United States Patent Application Publication US 2025/0236838 A1 - sequence listing, part 2

SEQ ID NO: 1 - DNA, 5441200 bp, Escherichia coli (residues 1,813,735-3,627,468 of 5,441,200)
  source 1..5441200: mol_type = genomic DNA
gtgtaaagtttgatacaccaaaatgacgcactttgccgctctgatgcagatgtttaaaggcgtccgccacttcatcggcatccattaacgggtctggtcggtggattaacagcagatccagatgatcggtcgcgagattaattagcgactgttcggcgctcttaatgatgtgatcgcggtcagtgatgtaatggccaatgacgttttcttcacacgcggtcgtcgcgataccgcatttactgacgatttccatccgttcacgcaggtgaggtgccagtttcagcgcctcgccaaacgccgcttcgcactgatagccaccataaatatcagcatggtccacggtggtcacgccgagatccagatgctcttcaataaaactgaccaactggcgggcggacatgttccagtccatcaatcgccagtagcccatcacaaaacgggaaaactccgggccttgcggcgcaatagtaatacgctgaaccataatcgcttcctcttatcagatatgagaggagtatacgcaagattagggtcaaaagagtgatggttgctccggttcgtctgatggcgctggcttatttacacgtaatttgcgcattaatcgctgccgacaaaggcgcaacacttcttgtttttcgccatcgctcatcttattccagttaaaacgctcatcccggctacgaaaacagccgcgacaaaatccccgttcgtcagactggcaaattccccggcacgggctctggacgggaaagaactctaattgctccgtcacctcgccctcctcagataagattattaccattattgaagctgttaatgtccaaagtagcaactttgcttgcactagaccgactggtctactacactccaacgcatgaacaaacacaccgaacatgatactcgcgaacatctcctggcgacgggcgagcaactttgcctgcaacgtggattcaccgggatggggctaagcgaactcctaaaaaccgctgaagtgccgaaagggtccttctatcactactttcgttctaaagaagcgtttggcgttgctatgcttgagcgccattacgccgcatatcaccagcgactgactgagttgctgcaatccggcgaaggtaactaccgcgaccgcatactggcttattaccagcaaacactgaaccagttttgccaacatggaaccatcagtggttgcctgacagtaaaactctctgccgaagtgtgcgatctgtcagaagatatgcgcagcgcaatggataaaggggctcgcggcgtgatcgccctgctctctcaggcgctggaaaatggccgtgagaaccattgtttaaccttttgtggcgaaccgctgcaacaggcacaagtgctttacgcactgtggcttggcgcgaatctgcaggccaaaatttcgcgcagtttcgagccactggaaaacgcgctggcccatgtaaaaaacattattgcgacgcctgccgtttagcaggcattttttatcaccagacgaccgggagcctttatgtcatctgaaaaactgtattccccactgaaagtgggcgcgatcacggcggcaaatcgtatttttatggcaccgctgacgcgtctgcgcagtattgaaccgggtgacatccctaccccgttgatggcggaatactatcgccaacgtgccagtgccggtttgattattagcgaagccacgcaaatttctgcccaggcaaaaggatacgcaggtgcacctggcatccatagccaggaacaaattgccgcatggaaaaaaattaccgctggcgttcatgctgaaaatggtcatatggccgtacagctgtggcacaccggacgcatttctcacgccagcctgcaacctggcggtcaggcaccggtagcgccttcagcacttagcgcgggaacacgtacttctctgcgcgatgaaaatggtcaggcgatccgtgttgaaacatccatgccgcgtgcgcttgaactgggagagattccgggtatcgtcaatgatttccgtcaggccattgctaacgcgcgtgaagccggttttgatctggtagagctccactctgctcacggttatttgctgcatcagttcctttccccttcttcaaaccatcgtaccgatcagtacggtggcagcgtggaaaatcgcgcgcgtctggtgctggaagtggtcgatgccgggattgaagaatggggtgccgatcgcattggcattcgcatttcgccaatcggtactttccagaacacggataacggcccgaatgaagaagccgatgcactgtatctgattgaacaactgggtaaacgcggcattgcttatcttcatatgtcagaaccagattgggcgggaggtgaaccatatactgatgcgtttcgcgaaaaagtacgcgcccgtttccacggtccgattatcggcgcaggtgcatacacagtagaaaaagctgaaacgctgatcggcaaagggttaattgatgcggtagcatttggtcgtgactggattgcgaacccggatctggtcgcccgcttgcagcgcaaagctgagcttaacccacagcgtgccgaaagtttttatggtggcggtgctgaaggttacactgattacccgacgctgtaatccaacattgcgagcggcgcaaagccgccgctatactaaaacaactttttgaatctgttagccattttgaggatataaagatgcgtcttcttcataccatgctgcgcgttggcgatctgcaacgctccatcgatttttataccaacgtgctgggcatgaaactgctgcgtaccagcgaaaacccggaatacaaatactcactggcgtttgttggttacggcccggaaaccgaagaagcagtgattgaactgacctacaactggggcgtggataaatacgaactcggcactgcttatggtcacatcgcgcttagcgtagataacgccgctgaagcgtgcgaaaaaatccgtcaaaacgggggtaacgtaacccgtgaagcgggtccggtaaaaggcggtactacggttatcgcatttgtggaagatccggacggttacaaaattgaattaatcgaagagaaagacgccggtcgcggtctgggcaactaatctcctgccgggcgtgaactcatcgcgcccgcatctttactgcatcgacaagtaatatttgtcataatgcgcgctgcaatttatccgtattaagagaatcagatgtccgataacgctcaacttaccggtctgtgcgaccgttttcgtggtttttatcctgttgtgatcgatgttgaaacagccggatttaacgccaaaaccgatgcgctgcttgagattgccgccatcaccctgaaaatggatgaacaaggctggctgatgccggacaccacattacatttccacgtcgaaccatttgtcggcgcaaatttgcaaccagaggcccttgccttcaatggcattgatccgaacgatcccgatcgcggcgcggtcagcgagtacgaggcgctgcacgaaatttttaaagttgtacgtaaaggtattaaagcgagcggctgtaaccgcgccattatggtggcgcacaacgccaatttcgatcacagctttatgatggccgccgcagaacgcgcctcactgaaacgtaacccgttccaccctttcgccacttttgacactgctgcactggccgggctggcactcggacaaaccgtattgtcaaaggcttgccagaccgctggcatggacttcgacagcacccaggcgcactccgcgttgtacgacaccgaacgcactgctgtgctgttttgtgaaatcgtcaaccgctggaaacgtctgggaggctggccgctacctgccgccgaagaggtgtaatcgagtcgatgcctgatgacatgcaatgattcaggcatctatagtgaggctattccacgcatcatgcatgatattcacggggaatagcgttaatggcaaataatccaaacccttcatcgcccctgccggacgtgttttcaccggcgacccgcgactggtttcttcgcgcctttaaacagccgaccgctgtccagtcgcgaaccacggctgcgctttacgctaacagaagtgaatgacctaccggtccggcaaacgccgatgtttacgctgttacgtgaggcgggattttcaagttcgccacaagggctggattggggatagagaaaggactgacggatgcccgttcgcatccgtcagtattgcaggacggattattccgcgtccggctcttcagacttgtatttagcggcagtttctttgatcagctgctgcagttcaccacgctgatacatttcgatcacgatatcacaaccgcccaccagctcgccgtcaacccacagttgcgggaaggtcggccagttcgcatatttcggcagttccgcacgaatgtccggattctgcagaatatcaacataggcaaaacgttcgccacatgcggcaagcgcctggactgcctgggcagagaaaccgcagctcggcagtttcggtgaacctttcatgtacagcaggatcgggttttcagcaatctggcgttggattttttcgatagtggtgctcattgtcttgcttcctcaaacttctttacggcagtaatctgacattgtagcgggtcagtgcggcatcggaaaataacattttcatcacgcttttgctattttatccctttgctctatttgttgcatttcaaatattcgtttcttccctgatgcacggcaaactggcgtatttataaccatttttagctttcactgctgcatttttttgcgctcgccgacgaaacgtattttttaacaataaaagctattaactttctcttcttctatgcattagaatcatcaagttttgtaaatcagacgcaggcatgatagacctgccttaacagagggacgctcagtggcgcggataaaccgtatttcgatcacgctctgtgctttactttttaccaccctgcctttaacgcctatggcccatgcttcaaagcaagccagggagagttctgctaccactcatatcaccaaaaaagcagataaaaagaaaagcacggcaaccacccaaaagacccagaaagccagccagaaaacagcgaaaaaagccgccagtaaaagtacgaccaaaagcaaaaccgcttcttccgttaaaaaatcttccattaccgcttctaaaaacgccaaaactcgcagcaaacacgccgtcaataaaacggcctcagccagctttaccgaaaagtgtaccaaacgtaagggctataaatcgcattgtgtgaaagtcaaaaatgccgcgtcaggaacccttgccgacgcgcacaaagcgaaggtgcaaaaagccacaaaagtggcaatgaataaactgatgcagcaaattggtaagccatatcgttggggtggcagttcaccgcgtaccggttttgattgcagcggtctggtttattacgcttataaagatttggtgaaaattcgtattccgcgtacggcgaatgaaatgtatcacctgcgcgatgcagcgccaatcgaacgtagtgaactgaaaaacggcgacctggtcttcttccgtactcagggacgcggtacagccgatcatgtcggcgtgtatgtcggcaacggcaaatttattcagtcaccgcgcacgggccaggaaattcaaatcacttctctcagtgaagactactggcagcgccactatgttggcgctcgccgggtaatgaccccaaaaacacttcgctaaaactttaccctgttgttacggcaacagggtaagttcatcttttgtctcaccttttaatttgctaccctatccatacgcacaataaggctattgtacgtatgcaaattaataataaaggagagtagcaatgtcattcgaattacctgcactaccatatgctaaagatgctctggcaccgcacatttctgcggaaaccatcgagtatcactacggcaagcatcatcagacttatgtcactaacctgaacaacctgatcaaaggtaccgcgtttgaaggtaaatcactggaagagattattcgcagctctgaaggtggcgtattcaacaacgcagctcaggtctggaaccatactttctactggaactgcctggcaccgaacgcgggtggcgaaccgactggaaaagtcgctgaagctatcgccgcatcttttggcagctttgccgatttcaaagctcagtttactgatgcagcgatcaaaaactttggttctggctggacctggctggtgaaaaacagcgatggcaaactggctatcgtttcaacctctaacgcgggtactccactgaccaccgatgcgactccgctgctgaccgttgatgtctgggaacacgcttattacatcgactatcgcaatgcacgtcctggctatctggagcacttctgggcgctggtgaactgggaattcgtagcgaaaaatctcgctgcataataactgatggcaaatgcaacattatctgatgcgcttcgcttaccatgccaacgcggatgaggcgttaacagcgcattcggcaagataaatcgcacgttgccagcaactgtaacgcagaaggttatccttctgcgtttttgtttaattagctgttggcaacgcaaactgcttcaggttgttttctggctgacataaacaccagcaataatgccagtcccgcgacaatcgcccccatcaccggcacaaaactgtatcccagcccagcggaaattaccgcaccaccagcagctgctcccagcgcatttccaagattaaaggcaccaatattgactgatgaagacagacctggcgcttcactggcgacacgcatcacgcgcatctgtaacggcggtacgaccgcaaaggttgcagctccccacaccaccatgctaatagctgcgccgaactcattgcgggccaggaacgggattgccagcataatcaccatcagcagcaacaaaaagcctttcaacgtgccgttaactgaacgatctgccagtttgccgccgagatagttaccgatagagaatccgacaccaatcagcaccagcattgccgtgacgaacaccggtgtggcgtgggtaatgctttgcagtaccggagagatataggtgtagagggtaaacattgcaccagcgcccagcaccgtcgtcagcaatgcagacagcacctgcggacgcattaataccgccagctcttttttcacttcaggtcgcgcccctgcgccacctttaggtaatgagaggaacagacttaccattgaaatcacgcccagccccgctgttgccagaaatgacatccgccagccgatggtttcgcccaaccaggtcgccgccggcacgccaccgatatttgccagggttaaccccataaacatagtggcaactgcgctagcctgtttatgttttggcactacgcttgcggccacgactgaacccaaaccaaaaaatgccccgtgattcaggctggtcaaaatgcgtgaaagcatcagggtcatataatccggcgcgatggcggaaagtacgttgccaagcgtgaaaatcgccatcaggaaaatcaacgcactgcggcgggcacgatgagaaagtagaagcgtcatcagcggcgcgccaaccattacgccaactgcataagcactgattaacattccggcagcgggaatcgagacatccacaccgcgcgcaatgacgggcaacaagcccattggcgagaactccgttgtcccgataccaaacgcgccaatcgccagcgccagcaacggatagttaattttcatgccttatctccacctcttcgcgtcattacgcgatattcattaaagtggcgaaagcatgacagtaatcacaaaaaaatgaaaataacaaaaagagaaaacacttttgccattttgctaacaaacaggaaggagatgcgagggagaacgcgctccctcgagaggaaatcagtgcagcgcggcagtcaaacccacggccacgatcaaaccgaggacgataatcgttgttaccagtgaaaatttaaggtcggtgctcatcaagttttctccttttttattaccacacaaaaagtgatattacgcatttttacacactgtgatgaaaaaatctcccgtcatttataatgataagtgtttttactacttccccttttcgtcaagatcggccaaaattccacgcttacattatttgcgtactggccattgaccccttcctgacgctccgtgtcgtttttccggcgtaccgcaacatttttgttgtgcgtaaggtgtgtaaaggcaaacgtttaccttgcgaatttgcaggagctgaagttagggtctggagtgaaatggaatggcaacaataaaagatgtagcgaaacgagcaaacgtttcaactacaactgtgtcacacgtgatcaacaaaacacgtttcgtcgctgaagaaacgcgcaatgccgtgtgggcagcaatcaaagaattacactactcccctagcgcggtggcgcgtagcctgaaggttaaccacaccaagtctatcggtttgctggcgaccagcagcgaagcggcctattttgccgagatcattgaagcggtcgaaaaaaattgcttccagaaaggttacaccctgattctgggcaatgcgtggaacaatcttgagaaacagcgggcttatctgtcgatgatggcgcaaaaacgcgtcgatggtctgctggtgatgtgttctgagtacccagagccgttgctggcgatgctggaagagtatcgccatatcccaatggtggtgatggactggggtgaagcaaaagctgacttcaccgatgcggtcattgataacgcattcgaaggcggctacatggccgggcgttatctgattgaacgcggtcatcgcgaaatcggcgttatccctggcccgctggaacgtaacaccggcgcaggccgccttgccggttttatgaaggcgatggaagaagcgatgatcaaagtgccgcaaagctggattgtgcagggtgactttgaacctgaatccggttatcgcgccatgcagcaaatcctgtcgcagtcgcatcgccctactgccgtcttctgtggtggcgatatcatggcaatgggcgcactttgtgctgctgatgaaatgggtctgcgcgtgccgcaggatgtttcgctgatcggttatgataacgtgcgcaacgcccgctattttacgccggcgctgaccacgatccatcagccaaaagattcgctgggcgaaacagcgttcaacatgctgttggatcgtatcgtcaacaaacgtgaagaaccgcagtccattgaagtgcatccgcggttgattgaacgccgctccgtggctgacggcccgttccgcgactatcgtcgttaatcacccgttgcgggagtctcttccggctcccgcagccactccttattcagcgtctcactatcgccgagatactcaagcaaccaggttaacgcaggcgacatatcattttgctgccatgtcagacaacatgccgaatccgggaaggggttttccagttctagtgctacccacttcccctcattaagccacggtttggcgaaatgtgttggcaccatccctatgcataatcctgccgagatacaggttgccgatgattcccagtcaggcacgacaagtcttttttggttatccagcaaccaggtaatacgtttaggtagcgttcgcgaggtgtcttcgcgcaccaatgacggccagttgcgcaacgtatcatcgctgaacgggccatccatcaacgccagcgggtggtggctggcaacaacgcaactccagcttaacatccccatatcccggaaggtataacgaccgcctaccggaatcgcgcgtgttgcgccaatcgccagttccacgcgcccgtcggaaagtgcatcccagacaccgttgaacacttcctgaaagacaagaagttcgacatcatcaaaatggcgataaaaatcaacgatcatctgccgtgttcgctctggcctgacaatattatccactgcgatagctaactgaccgcgccagccgttcgctatctgctgacattgctggcgggtgatctgcatttttttgacaacagagcgtccttctttgagaaaccacgccccggcagcggtcagttccacatcacggtgacgtcgttcaaaaagcggcaccgccagccactcttccagctgacgcacggtatagctgaccgcagaaggaacgcgatgcaactcctgggccgcggcgctaaaactaccattacgcgctaccgcatcaacaacttccagagaatattctgaccacatagtctgcctgcaaaatttttgaaaccaatcatcaaatattaccgtttcacaacactaatttcactccctacactttgcggcggtgtttaattgagagatttagagaatatacatgcaacctgggaaaagatttttagtctggctggcaggtttaagcgtactcggttttctggcaaccgatatgtatctgcctgctttcgccgccatacaggccgacctgcaaacgcctgcgtctgctgtcagtgccagccttagtctgttccttgccggttttgccgcagcccagcttctgtgggggccactctccgaccgttatggtcgtaaaccggtgttattcatcggcctgacaatttttgcgttaggtagtctggggatgctgtgggtagaaaacgccgccacgctgctgatattgcgttttgtacaggctgtgggtgtctgcgccgcggcggttatctggcaagcattagtgacagattattatccttcacagaaagttaaccgtatttttgcgaccatcatgccgctggtgggtctgtctccggcattggctcctctgttaggaagctggctgctggtccatttttcctggcaggcgattttcgccaccctgtttgccattaccgtggtgctgattctgcctattttctggctcaaacccacgacgaaggcccgtaacaatagtcaggatggtctgacctttaccgacctgctacgttctaaaacctatcgcggcaacgtgctgatatacgcggcctgttcagccagtttttttgcatggctgaccggttcaccgttcatccttagtgaaatgggttacagcccggcagttattggtttaagttacgtcccgcaaactatcgcgtttctgattggtggttatggctgtcgcgccgcgctgcagaaatggcaaggcaagcagttattaccgtggttgctggtactgtttgctgtcagcgtcattgcgacctgggctgcgggcttcattagccatgtgtcgctggtcgaaatcctgatcccattctgtgtgatggcgattgccaacggtgcgatctacccgattgttgtcgcccaggcgctgcgtcccttcccacatgcaaccggtcgcgccgcagcgttgcagaacactctgcaactgggtctgtgcttcctcgcaagtctggtagtttcctggcttatcagtatcagcacgccattgctcaccaccaccagcgtgatgttatcaacagtagtgctggtcgctctgggttacatgatgcaacgttgtgaagaagttggctgccagaatcatggcaatgccgaagtcgctcatagcgaatcacactgatctatatcgatatacttatacttaggctgctaacaaaattttgttgtatgattgaaattagcggcctatactaatttcgagttgttaaaactacgataaatattatgttattacggggacaggatcgttcccgactcactatggatggtcatttcggcaagggttcctcctttccctctgttctacgtcggattatagactcgcggttttttctgcgagatttctcacaaagcccaaaaagcgtctacgctgttttaaggttctgatcaccgaccagtgatggagaaactatgagttcatcgtgtatagaagaagtcagtgtaccggatgataactggtaccgtatcgccaacgaattacttagccgtgccggtatagccattaacggttctgccccggcggatattcgtgtcaaaaaccccgatttttttaaacgcgttctgcaggaaggttctttggggttaggcgaaagttatatggatggctggtgggaatgtgaccgactggatatgttttttagcaaagtcttacgcgcaggtctcgagaaccaacttccccatcatttcaaagacacgctgcgtattgccggcgctcgtctcttcaatctgcagagtaaaaaacgtgcctggatagtcggcaaagagcattacgatttgggtaatgacttgttcagccgcatgcttgatcccttcatgcaatattcctgtgcttactggaaagatgccgataatctggaatctgcccagcaggcgaagctcaaaatgatttgtgaaaaattgcagttaaaaccagggatgcgcgtactggatattggctgtggctggggtggactggcgcactacatggcgtctaattatgacgtaagcgtggtcggcgtcaccatttctgccgaacagcaaaaaatggctcaggaacgctgtgaaggcctggatgtcaccattttgctgcaagattatcgtgacctgaacgaccagtttgatcgtattgtttctgtggggatgttcgagcacgtcggaccgaaaaattacgatacctattttgcggtggtggatcgtaatttgaaaccggaaggtatattcctgctccatactatcggttcgaaaaaaaccgatctgaatgttgatccctggattaataaatatattttcccgaacggttgcctgccctctgtacgccagattgctcagtccagcgaaccccactttgtgatggaagactggcataacttcggtgctgattacgatactacgttgatggcgtggtatgaacgattcctcgccgcatggccagaaattgcggataactacagtgaacgctttaaacggatgtttacctattatctgaatgcctgtgcaggtgctttccgcgcccgtgatattcagctctggcaggtcgtgttctcacgcggtgttgaaaacggccttcgagtcgctcgctaaaggctattctatcgccccctctccgggggcgatttcagatcaggcttgtgtacctggttgattcatggcattttctcgtgccgccagtacacgttctaccgtatctaccactgcctgagtttgtggatcgatttcaatgttgacgcgtgcgccgagttttttcttcccaagagtcgtgcgttccagtgtttccggaattaaatggacgcaaaaacgcgttggcgtgacttcgccgacggtcaggctaataccgtcgatgccaataaatcctttgtacaggatatatttcatcaactgactatcctggactttaaaccagatctgacgattattttccgaggttaatattttcgccacttcagcggtggtcataatatgacctgacattaagtgtccgccaatttcatcgctgaatttcgccgcacgctcaacgtttacccaatcccccacttttaaatcgccaagattagtaatgcgtaacgtttctttcatcagatcaaaactgacatggttgccgttaatttccgtcacggtcaggcaacaaccgttatgcgccacggaagcaccggtttccagaccgtccagcatgtggtcgggtaactccaccacatgcgtgcgaaaatttggtttttcgtcaatcgacaccagttttgcggtgccctgtacaatccccgtaaacatacttacaactcctgaaatcagttaagacattctgttcagcacaatagcaggtggcaaacgcccttaccagtgaaggggtaagaatgactattttttcactggagaattaataaatcctcgctacaatagactgaatttcccctgcttcttctttttgctgcccattcaggcggctttttagtctctcatataactacaaataaaaggtgttcacgtgcagaagtatatcagtgaagcgcgtctgttattagcattagcaatcccggtgattctcgcgcaaatcgcccaaactgcgatgggttttgtcgataccgtgatggcgggcggctatagtgccaccgacatggcggcggtcgctatcggtacttctatctggcttccggcgatcctctttggtcacggactgctgctggcattaacgccggttatcgcgcaattaaatggttccggtcgacgtgagcgcattgcgcatcaggtgcgacagggcttctggctggcgggttttgtttccgttctcattatgctggtgctgtggaatgcgggttacattatccgttccatgcaaaacatcgatccggctctggcggacaaagccgtgggttatctgcgtgcgttgctgtggggcgcgccaggctatcttttcttccaggttgcccgtaaccaatgtgaaggtctggcaaaaaccaagccgggtatggtaatgggctttatcggcctgctggtgaacattccggtgaactatatctttatttatggtcatttcggtatgccagagctcggtggcgttggttgtggcgtagcgacagcggcggtgtattgggtcatgttccttgccatggtttcttacattaaacgcgcccgctcgatgcgcgatattcgtaacgaaaaaggcaccgcgaagcccgatcctgcggttatgaaacgactgattcaactcggtttgccgattgcgctggcactgttttttgaagtaacgctgtttgccgtcgtggctctgttagtgtctccgctcggtattgttgatgtcgcaggacatcagattgccctgaactttagttcactgatgttcgtacttcccatgtcgctggcggcagcggtaaccatccgcgtaggttatcgtctgggtcagggctcaacgctggatgcgcaaaccgctgcgcggaccgggcttatggtgggtgtctgtatggcaaccctgacagccatattcacggtttcactgcgggagcaaatcgccctgttgtacaacgacaatcccgaggttgtaacgctggctgcgcatttgatgttgctggcggcggtatatcagatttctgactctatccaggtgattggcagtgggattttgcgtggttataaagatacgcgttccattttctatatcacctttacggcttactgggtgctgggcttgccaagcggctatattctggcactgaccgatctggtcgttgaacctatggggccagcaggcttctggataggctttattattggcctgacttcggcagccattatgatgatgctgcgtatgcggttcctgcaacgtctgccgtcagccatcattctgcaacgagcagctcgctagtaaagacaaggcgcaaccttcacgggttgcgcctgtgtttttacgcaggctggagcgttgcgccaatcccgtcttcgtctggctgtagtttcagtgcgttacacagagtttgccgactggcatctgttatctcaacgtgtatatcaccagtaacttcccctttcacattgatgaagtcaggtgaaatttctttcgcactggtttgcaggcaaatcgctccctctccacgcaggcgtttcactttcagatgcacctgcgttgccgcatcagtgatcagccacagttttccgccattcagattgatgttaccaacactgaaagtgacactgtcaccttttaccgtactgccgtcgagaatcaacacaccgccctgctgtacagtaatcgttgattgttgcagatctgcgccatagccaataatcattgaagcgccgtccagtaatgcaacactaccggtcagttcaaccggtgcgcgatcttcctctacgacaaaattttcgtccgcgctggtgggtgacaacaaaatcactgtcccaccttgtattaccgcgttttccagcgtaccagcatgcacttcagcccgaccacccacattaacggacaggttttgcgtcttaccggaactgtagagctgaagaccatccgtccccagacgatagatggctccattctcaacaatagtgtcagagtcttcaccaccgagattattcatggtgccaccagcaagcaacgtatcattggctttccccgccagcataaaaacgccgccctgattaatctcacaattgctggcttccccacctggatacaccaacaattcaccaccttcatctaccacgaccgctgaggttgtcccattgaccaacaggccaccctcttgatcgagaataattttttccgcgcgatggccttccagtacacgcaggttaccgccattttccagcaacaaaccgcaggcataacctttatcaacgctgaattcaccttcgggatggcggccattaaccgtagcgagcgtagagagactaattgcgcctccctcggactgaacaatatctgtggcaatggcaccgtcgctgaccgatagcgtgccattgttaccgtactgtgcgcatttggctatcccaccggttgccactttcaaccagccagcccccgtgaccacggtattttcggctcttccgccagcttcaacaatcaactcgccttcagtaagttgcgtcgcgccaataacctcgccggtcttaacaatttgcacgttcccgtcgctcatcaagtttttcgcatcagatcccatgatttattcctttgctgcatctgtgtgcctttattgctacctaagtgtaaaggctacgaaggatttatccacgacagatttgagatggtggcaaacaactctgtttaaactctgatacacggattattgggttgtatcagatgtaaatgcgatcctgaataaaaatcgcccttgcaaatcaacaaaatatagccaatttgcttaaaagctctgcaaacggtcgaaatagcgcagaaaattacgttttgcctcttgccaccttcccactctgccgctaatattcgtccccgttgtcacctacaacgttgcgttcatagctcagttggttagagcaccaccttgacatggtgggggtcgttggttcgagtccaattgaacgcaccatcctgcgtccgtagctcagttggttagagcaccaccttgacatggtgggggtcggtggttcgagtccactcggacgcaccagattttatattcacggtttcactgcgggagcaaatcgccctgttgtacaacgacaatcccgaggttgtaacgctggctgcgcatttgatgttgctggcggcggtatatcagatttctgactctatccaggtgattggcagtgggattttgcgtggttataaagatacgcgttccattttctatatcacctttacggcttactgggtgctgggcttgccaagcggctatattctggcactgaccgatctggtcgttgaacctatggggccagcaggcttctggataggctttattattggcctgacttcggcagccattatgatgatgctgcgtatgcggttcctgcaacgtctgccgtcagccatcattctgcaacgagcagctcgctagtaaagacaaggcgcaaccttcacgggttgcgcctgtgtttttacgcaggctggagcgttgcgccaatcccgtcttcgtctggctgtagtttcagtgcgttacacagagtttgccgactggcatctgttatctcaacgtgtatatcaccagtaacttcccctttcacattgatgaagtcaggtgaaatttctttcgcactggtttgcaggcaaatcgctccctctccacgcaggcgtttcactttcagatgcacctgcgttgccgcatcagtgatcagccacagttttccgccattcagattgatgttaccaacactgaaagtgacactgtcaccttttaccgtactgccgtcgagaatcaacacaccgccctgctgtacagtaatcgttgattgttgcagatctgcgccatagccaataatcattgaagcgccgtccagtaatgcaacactaccggtcagttcaaccggtgcgcgatcttcctctacgacaaaattttcgtccgcgctggtgggtgacaacaaaatcactgtcccaccttgtattaccgcgttttccagcgtaccagcatgcacttcagcccgaccacccacattaacggacaggttttgcgtcttaccggaactgtagagctgaagaccatccgtccccagacgatagatggctccattctcaacaatagtgtcagagtcttcaccaccgagattattcatggtgccaccagcaagcaacgtatcattggctttccccgccagcataaaaacgccgccctgattaatctcacaattgctggcttccccacctggatacaccaacaattcaccaccttcatctaccacgaccgctgaggttgtcccattgaccaacaggccaccctcttgatcgagaataattttttccgcgcgatggccttccagtacacgcaggttaccgccattttccagcaacaaaccgcaggcataacctttatcaacgctgaattcaccttcgggatggcggccattaaccgtagcgagcgtagagagactaattgcgcctccctcggactgaacaatatctgtggcaatggcaccgtcgctgaccgatagcgtgccattgttaccgtactgtgcgcatttggctatcccaccggttgccactttcaaccagccagcccccgtgaccacggtattttcggctcttccgccagcttcaacaatcaactcgccttcagtaagttgcgtcgcgccaataacctcgccggtcttaacaatttgcacgttcccgtcgctcatcaagtttttcgcatcagatcccatgatttattcctttgctgcatctgtgtgcctttattgctacctaagtgtaaaggctacgaaggatttatccacgacagatttgagatggtggcaaacaactctgtttaaactctgatacacggattattgggttgtatcagatgtaaatgcgatcctgaataaaaatcgcccttgcaaatcaacaaaatatagccaatttgcttaaaagctctgcaaacggtcgaaatagcgcagaaaattacgttttgcctcttgccaccttcccactctgccgctaatattcgtccccgttgtcacctacaacgttgcgttcatagctcagttggttagagcaccaccttgacatggtgggggtcgttggttcgagtccaattgaacgcaccatcctgcgtccgtagctcagttggttagagcaccaccttgacatggtgggggtcggtggttcgagtccactcggacgcaccagattttatcccgaggttgtaacgctggctgcgcatttgatgttgctggcggcggtatatcagatttctgactctatccaggtgattggcagtgggattttgcgtggttataaagatacgcgttccattttctatatcacctttacggcttactgggtgctgggcttgccaagcggctatattctggcactgaccgatctggtcgttgaacctatggggccagcaggcttctggataggctttattattggcctgacttcggcagccattatgatgatgctgcgtatgcggttcctgcaacgtctgccgtcagccatcattctgcaacgagcagctcgctagtaaagacaaggcgcaaccttcacgggttgcgcctgtgtttttacgcaggctggagcgttgcgccaatcccgtcttcgtctggctgtagtttcagtgcgttacacagagtttgccgactggcatctgttatctcaacgtgtatatcaccagtaacttcccctttcacattgatgaagtcaggtgaaatttctttcgcactggtttgcaggcaaatcgctccctctccacgcaggcgtttcactttcagatgcacctgcgttgccgcatcagtgatcagccacagttttccgccattcagattgatgttaccaacactgaaagtgacactgtcaccttttaccgtactgccgtcgagaatcaacacaccgccctgctgtacagtaatcgttgattgttgcagatctgcgccatagccaataatcattgaagcgccgtccagtaatgcaacactaccggtcagttcaaccggtgcgcgatcttcctctacgacaaaattttcgtccgcgctggtgggtgacaacaaaatcactgtcccaccttgtattaccgcgttttccagcgtaccagcatgcacttcagcccgaccacccacattaacggacaggttttgcgtcttaccggaactgtagagctgaagaccatccgtccccagacgatagatggctccattctcaacaatagtgtcagagtcttcaccaccgagattattcatggtgccaccagcaagcaacgtatcattggctttccccgccagcataaaaacgccgccctgattaatctcacaattgctggcttccccacctggatacaccaacaattcaccaccttcatctaccacgaccgctgaggttgtcccattgaccaacaggccaccctcttgatcgagaataattttttccgcgcgatggccttccagtacacgcaggttaccgccattttccagcaacaaaccgcaggcataacctttatcaacgctgaattcaccttcgggatggcggccattaaccgtagcgagcgtagagagactaattgcgcctccctcggactgaacaatatctgtggcaatggcaccgtcgctgaccgatagcgtgccattgttaccgtactgtgcgcatttggctatcccaccggttgccactttcaaccagccagcccccgtgaccacggtattttcggctcttccgccagcttcaacaatcaactcgccttcagtaagttgcgtcgcgccaataacctcgccggtcttaacaatttgcacgttcccgtcgctcatcaagtttttcgcatcagatcccatgatttattcctttgctgcatctgtgtgcctttattgctacctaagtgtaaaggctacgaaggatttatccacgacagatttgagatggtggcaaacaactctgtttaaactctgatacacggattattgggttgtatcagatgtaaatgcgatcctgaataaaaatcgcccttgcaaatcaacaaaatatagccaatttgcttaaaagctctgcaaacggtcgaaatagcgcagaaaattacgttttgcctcttgccaccttcccactctgccgctaatattcgtccccgttgtcacctacaacgttgcgttcatagctcagttggttagagcaccaccttgacatggtgggggtcgttggttcgagtccaattgaacgcaccatcctgcgtccgtagctcagttggttagagcaccaccttgacatggtgggggtcggtggttcgagtccactcggacgcaccagattttcttaatctggtcttctccttttttccctctgtttcttctatgtatccaatacgttaaaagatctacactgtcttcgtatgcgttatcagaaggagaatcgctatggcaactttgttacaacttcattttgcttttaatggcccatttggcgacgcaatggctgagcagcttaaaccgcttgctgagtcgattaatcaggaacctggttttctgtggaaggtttggacagaaagtgaaaagaaccacgaagccggtgggatctaccttttctctgatgaaaaaagcgcccttacctatctggaaaaacatactgcccgactgaaaaatcttggcgttgaggaagttgtcgccaaagttttcgatgtcaatgtgtcactgagtcaattcaatcaggcaaaacttgcctgacagattttaatcaagggcggttagtgcccttttcatccctgtctgaaatttctcaaattctaaaaatctcaaccaaacttacctgataacactaaattcgaaagaatgcgtacaggtaagtaacaatgaaaacaattgctattgtgggtgccgggcctacggggatctacaccttattctcgcttctacagcaacaaacgccactttctatttctatcttcgagcaggctgacgaagccggtgtcgggatgccatacagtgatgatgaaaactcaaaactgatgctggcaaacattgccagtattgaaataccgccgatttattgcacgtatctcgaatggctacaaaagcaagaagccagccatctccagcgttatggcgttaaaaaagaaaccttgcacgatcgtcagtttttaccgcgaattctgctgggcgaatatttccgcgatcaatttttacgattagtagaccaggcacgacagcaaaaatttgcagtggctgtttatgaatcatgccaggttaccgatctgcaaattacaaatgctggcgtcatgctcgctacaaatctggatttacccagcgagacgtttgatttagtggtgatcgcaacggggcacgtctggcctgatgaagaagaagcaaccagaacgtattttcccagcccgtggtcaggcctgatggaagcaaaggtcgatgcgtgtaacgtgggtattatgggaacatccttgagcggactggatgcggcaatggcagtggctattcagcatggttcgttcattgaagatgataaacaacacgtcatttttcaccgcgataacgcaagtgaaaagctaaatattacgttaatgtcgcgcacaggtattttacccgaagccgatttctattgccctattccctacgagcccttacacatcgtcactgatcaagcattaaatgctgagattcaaaaaggcgaagagggccttttggatcgggtatttagattgatagtagaggaaatcaaatttgctgatccagactggagccaacgcatagccttagaaagcctgaatgtcgattcctttgctcaagcctggtttgccgagcgcaaacaacgcgacccattcgactgggcagaaaaaaatctccaggaggtcgaacgcaataaacgagaaaatcatactgttccctggcgttatgtcattctgcgcctgcatgaagccgtacaggaaattgttcctcatctgaatgaacacgaccataaacggttcagtaaaggccttgcccgggttttcatcgataattatgcgacaatcccttcagagtctattcgtcgactactggccttacgtgaagcgggaatcattcatattctcgccctcggtgaagactacgaaatggaaattaatgagtcgcgcaccgtcctgaaaacggaagacaatagctactcgtttgacgtttttattgatgcccgtgggcagcgtccgcttaaagtgaaagatattcctttccctggactacgcgaacaattacagaaaacaggggatgaaatccctgatgttggcgaagattatacgttacagcaacccgaagatattcgtgggcgcgtagcgttcggcgcgttgccctggttgatgcacgaccagcctttcgttcagggacttacggcatgtgcagaaattggagaggcgatggctcgggcggtcgtaaaacctgcatcccgtgctcgtcggcgtctttcgtttaatcaaatgtaaagctatcagcactcaacaaactgatgctgttcattaaggcgatagcggactccggctcgaatattgttttcaccttcaatggcgacggcgaagcgaactctttcgccgtcatgatatgccagtgcggcgcttcctcctggcccgagaataattgagtcgaccacgcccgtgctcactaccgttgaattttcaccgctggcaatgatgtgtacattgtcgccgctgttggcaattctggcgtttgcgccaaagctggcgatttgcaccaggtcaccattactggcgacatgacaccgttcacccaatgtacaaacgcgtactcgcattccggtattcgcaatccgactactatctccagcgctgcttatccgcgaagaattaccggttacagcaacccgtgcgcgttcaccggagctgccaatgtgactgttaaagccgacacttccaatccgcacgctataacccatactggcaatttgcgcggcatacccagcagttgcgattctggcattatcctcacaacagccgatgcgagcatgatcgtcgctgcgggcaaactgactgcaaaatgctctctctccgggatctgtggccagtttttgcatagaagaaacttcctgatgcgcgaagttttcatccgccagccattttttccacgcatactcaaccagactctccgcccagtccgtatatccttcctcaatcagtgcatgatgaatatcggcataactaccgccgcgtgggaaatggcgcagaaaccagcgatacatcaccgctccgatacgccattctcgcaggtctgctcgtgtaatgatcattcgttagtgccggtgatagccatcgaccatgcttttaaaggtttcgtgtggcgtacgccccgtggtgcaaagataaagatgaccgaagataaaaaagaggcttataaatgccagagcaaaatgcgcctgcaataaccagtatcttacgccaggaaacatatctcccacggcttgcggatagagacacagcagccccgtcaatagtaacaacggcagcaatccatacatgacaccaacataggcaacctgctgtaagggattaaatttagactgggttgttgccgggaaaggatgttcttccccctgcataatgccaaacaaatagaatcgcgtttgttttgccgctcgctccagccacccctgacgacgaatgcgatagtggtgaccattacccccaacggcattgatcagaacaaagccgagccagcatgccagtaacaaaaatccgcaaacttcatgcaccgcaaccagacttttaaccgcagttgcgcccaccagcgcaaagtgatttatcagcccacttgccagcaacaatacaaagagtaacgcattcgaccagtgccataatctgaccgctttgctgtaaagataaatcctctcaccatgatcggtggctgatttcttcacgccacgagcacgaagcaaggcatgtagccccagcaccaaccacatcccaaccagcaatagtccggcaatgatcaaccacaccggccaaaattggggggtgaactgtggcacatagttcgccaactggctctgaaactgttcagcatgttgcgacgggttcatacattttcctttttaatcaaatgttgaccgaaccggcgatacagatgcggtttcccggcgccaggtagctgatattgatagtatttattttcctgcaaccacgcctgaatttctgggctatcttcgtgaccaaagatcaatgcgtgttccgggcaggcactgacgcaaatgggcggaaagccttttgccagtcgggtctcagcgcagaaatcacatttatctgccactttagtgacagggttaaggtagcgaacctggtacgggcaagcgccaatgcaataactgcagccgatgcactgcgatttttctacccgcacgatcccctgctcatcacgccacgacgcccctgtcgggcaaacgtcgatgcaaggagcatcttcgcagtgctgacatgactggcgaaaaaagtgatactgcgttccattgtcgttatcgatgactggaatgtgtgctatcgataaacggcttccctgagcggggacgtggttagttttacggcatgcgcgggcgcagatattacagccattgcaccgtgactcgtcatgaatcatggcataccgaacttccttttcttgcctcgtattcgctaacagagaagacgcagaaccagtaaaaaagattactgttcccatccccagaacaaatttgcgtcgagtgaaggacatctgattatcccctaatgcagtggctgcaactgtccaccctatccatgacatccccctgaaatttcaggggttctgaaactgctctacctcgaaccattcgcataagccatacgccttgccataggtcataaatcgctcgctaaacaagtacaacactgccgtcgatgactccacctgccgtatatcggcatattcaggtgcaacatccatcgtggcgatcgcggcttcaatctgcgcttcctggaagtaatatggcgcttgcatcagcatggcgactttgtaaggacgaggatacgtctggcactcaaaacgaacggcgtgtgcaatggcgcgacaaatgtcctgctccacaacttgcaaagacatcgccgcgtagttttcactcatggcctgcgttgagtaatagtaatcatcctggcttcccgtcatacaagcgatatccgcgtagtctccgttctgcttaatgttttccagcaaaactgacagttcctcttctgcaaccgaatagggcggcgagagaaacacagcgcgcgccaccagctgcccagccgcagaatgctggcgaatgaactctgccaggatttcagccggttctggttcggttaccgtatcaacggggtgacgcatcccctgcaaccattgccgcttcgcctcatcaatttcgctgacttccgctaacggcaattcatcctgatggttcatctctcccattccttacgcaggcagtagattgtgtgctgccagatcggcggcaatatcttccagccccagacgctgcaatgtttcgcgggtcggacaaccaagctgtgggtcccagcccatttctttgtagaacatcgtgagcgaagcatgcatatcgtcacgatccattttgtctgtaccttcagtaaagaccgggatctgcggatccttgtcgaatacccaggaacagataagatcgtgttcattacgcatatctttggtttgcatcagttttaccgtgtaggcgcgatgcaacgtaaagatacgctctgcagctaaatctaatttttcctgagtcatatcttcgccagtgatcgctttgaagaatttggcttcaagtgccagatcgccccggtaattacggcttttcagcggcgaaacggtcattggccagacccagttgcacagggtgacggcgttatgcaaacagacccgcaacagcgaccacttagcatatttaatttttgcgtcattgatcggtgtgtagtttttggtttcatcgtaagcatcttcagaaccaaaaagctctttcgccacttcacgctgcagtttcaatggcaagccggaaccaataaaattgatatgggtatgcgtcatgcagtcacggttgaacatacagttaacaatggaaccgacttgcgctgacgcttcattggcatggtgaaccggatagccaaacggcgaccagagtttatttttcgcgtagccccagtactcttcacccaaattccagcgttctgcgatggcatatgaaccatcagccaggtgactcaactcacccacgcgatgcgccagacggtagtaaaaatctttaataaagttaacgtcacccgcttccagttgatcccagcgaatttccgcatactcttcagcaggcagaacacgcttgaacacccctttgctgtaacaataagtaaagtcgcgatgcaactgcccgtagttacaccataggccgtagtcatcgaacaaattcagaccaaccaggttaccaatcacacgaccatcgtctttatcttcaaaatctttcggcccgttcgggaagatggtggtatggacaaagtttgctacacaagtgttaccacctgtgctgggcacgccaaactctttcacccgaggaatattcatttgggtcatacaacggatcgggcaagagtggcagccgctcatttttactgtgtatttctctgccgccggacctaagtcaaaaacggatttataggtacgaaagccgaccgtgttctgattgcctggcggaatttcccccgtttcaatcggaccaccttcagccgcgccccaaaacagccctttacgtgctgtccaacgtgacttgggatctgaatactctgcccacgattgcggcgtacttggcacgacatggttgttattcgcaccgataagttcagtcatcatgtaatcgttgagacgcttcatctcctgacgatcggcaatgttgacccctttcgtcccttcaaccgcaatcgctttcaggtttttcgaacccattattgcgccagttcccgcaccgccgctgtggttacggctattcaacatgccagagagaggaacaaggttttccccagcctgaccaatagccgccacacaggtttccggactggtcaagcgacaaatttcttcagtcgttgcgcgcgtcccttttccccataagaaatcggctttttcaaggctaactttgtcatctttaatcttcagccataccggtgatttcgctttcccttcgataataatgacgtcgtatccagcgaatttcatttgcgctgcaaaaaagccccccatatgggcatcgacgactaaatttcctttggtaaaagtagaaagtgaggtgatatttacgcgagaactacagggggcaccagatccagttaatgggccggtagcaaaaactaatttattcgcttcatcgaaaggtttcgtgcctggcggtacttcgtcatacataattttgtagccgaagcccatgccaccgacaaaacttttaaacttactggaatcttcgagggtaatatttcctgtcgtgagattgactcttaatatattacctgtccaaccgttagccatgattttttcctttgcaagattcacacagtaatatctttccactcgataatttttaacgcccctgttgggcaggcgtttgcgcattcaccgcataacacacatttcgaggattttttactttcggtatttacggtggccatcatccacgggcatgccgtagtacaggcgctacagccaatacaacgtttatgatcgacggtaatacagccttctttctgctgccaggtaatcgcaccaatcgggcagacgttcatgcattgcggctctttgcattgacggcaggtgtccgcggtatagttgagatcgccatacaggccaccgccagagccaaccccgttgtcgccaaagaaataattgcgatggattttgatacgggagaagaatgtccctactgagccatcgttgaagttggtacaagagatttcacagcggtggcaacccgtgcatcgcgcacgttgggtcaccagcacccctttgggtgtatttatcaaccctactgtgccgctatcaatatcttcctgtttgcaacccaaaagtgacagtaaagcaggggcaattgttaaaccagcaaggccttttcctgatatacgcaagaattctaatcgcgttaagccaatatttaatagtggacgatcaaccgggttcatttatttcgcatcctcttcgcaaacacagtgctgacaattcagcagcctgatattaggcactcaactaatacgctgctgactctgtcctcaacaccagatattttcccaaacccgatagtgtatgagaaaagatttaacgctgacaaactaatcctttatggttaggagaaaaaataatgtgattattctgggctcttaacattgatcgttatcaattaaaatcacaaagcaaggaattataagtgaactgatatttattatcatttgaaataaatttaacttaaccgacaattatttgtgaagttcatcgcagaaaataaaaataactttatcgctataaattaaaatacacaccgaaattcatataatttcagcagttgttatttagaatgattaactggaccgcaactgaactaacaatatcaggatgaagcttaccgcctcatcctgaatggtcattttaccagtgcgttaatgactgtttccatcgcctgcttttccagctcactgcgctgaatgcgtttattggctaatgctgtacgtaatacgcctgcgataacaatatgctttggttcctgccccagatcgcgcatttccagcacaactttaccgacaactctgcacatttctcggtacagttcatcctcttttgtccggtttcccattctttatacctatttatcatgccaactatcagcatatatcaatctaaccaattaaacaaaaatcaaacaaaatcagacaaataacgtgataaattattttaactgtagcaattgagcgatgatgtatttatacaccggatgaacttttcacttatcctcacactgacaaccccggcaccagacgttgcgcaaacaacgaagtttttgcgtaaccttttccctggaacgctgaatctttgataacaatttattgtcttacaagttgtatattttttgaaacgctgtttttgttttccttttggattaatttcagcgtataatgcgcgccaattgactcttgaatggtttcagcactttggactgtagaactcaacgactcaaaaacaggcactcacgttgggctgagacacaagcacacattcctctgcacgctttttcgatgtcacctatccttagagcgaggcacaaccactttcgtaataccggattcgctttccggcagtgcgcccagaaagcaagtttctcccatccttctcaacttaaagactaagactgtcatgaaaaagaccaaaattgtttgcaccatcggaccgaaaaccgaatctgaagagatgttagctaaaatgctggacgctggcatgaacgttatgcgtctgaacttctctcatggtgactatgcagaacacggtcagcgcattcagaatctgcgcaacgtgatgagcaaaactggtaaaaccgccgctatcctgcttgataccaaaggtccagaaatccgcaccatgaaactggaaggcggtaacgacgtttctctgaaagcgggtcagtcctttactttcactactgataaatctgttatcggcaacagcgaaatggttgcggtaacgtatgaaggtttcactactgacctgtctgttggcaacaccgtactggttgacgacggtctgatcggtatggaagttaccgccattgaaggtaacaaagttatctgtaaagtgctgaacaatggcgacctgggcgaaaacaaaggtgtgaacctgcctggcgtttccattgccctgccagcactggctgaaaaagacaaacaggacctgatctttggttgcgaacaaggcgtagactttgttgctgcttcctttattcgtaagcgttctgacgttatcgaaatccgtgagcacctgaaagcgcacggcggcgaaaacatccacatcatctccaaaatcgaaaaccaggaaggcctcaacaacttcgacgaaatcctcgaagcctctgacggcatcatggttgcgcgtggcgacctgggtgtagaaatcccggtagaagaagttatcttcgcccagaagatgatgatcgaaaaatgtatccgtgcacgtaaagttgttatcactgcgacacagatgctggattccatgatcaaaaacccacgcccgactcgcgcagaagccggtgacgttgcaaacgccatcctcgacggtactgacgcagtgatgctgtctggtgaatccgcaaaaggtaaatacccgctggaagcggtttctatcatggcgaccatctgcgaacgtaccgaccgcgtgatgaacagccgtctcgagttcaacaatgacaaccgtaaactgcgtattaccgaagcggtatgccgtggtgccgttgaaactgctgaaaaactggatgctccactgatcgtggttgctactcagggcggtaaatctgctcgcgcagtacgtaaatacttcccggatgccaccatcctggcactgaccaccaacgaaaaaacggctcaccagttagtactgagcaaaggtgttgtgccgcagctggttaaagagatcacatctactgatgacttctaccgtctgggtaaagaactggctctgcagagcggtctggcacacaaaggtgatgtcgtagttatggtttctggtgcactggtaccgagcggcactactaacaccgcatctgttcacgtcctgtaatattgcttttgtgaattaatttgtatatcgaagcgccctgatgggcgctttttttatttaatcgataaccagaagcaataaaaaatcaaatcggatttcactatataatctcactttatctaagatgaatccgatggaagcatcctgttttctctcaatttttttatctaaaacccagcgttcgatgcttctttgagcgaacgatcaaaaataagtgccttcccatcaaaaaaatattctcaacataaaaaactttgtgtaatacttgtaacgctacatggagattaactcaatctagagggtattaataatgaaagctactaaactggtactgggcgcggtaatcctgggttctactctgctggcaggttgctccagcaacgctaaaatcgatcagctgtcttctgacgttcagactctgaacgctaaagttgaccagctgagcaacgacgtgaacgcaatgcgttccgacgttcaggctgctaaagatgacgcagctcgtgctaaccagcgtctggacaacatggctactaaataccgcaagtaatagtacctgtgaagtgaaaaatggcgcacattgtgcgccatttttttgcctgctatttaccgctactgcgtcgcgcgtaacatattcccttgctctggttccccattctgcgctgactctactgaaggcgcattgctggctgcgggagttgctccactgctcaccgcaaccggataccctgcccgacgatacaacgctttatcgactaacttctgatctacagccttattgtctttaaattgcgtaaagcctgctggcagcgtgtacggcattgtctgaacgttctgctgttcttctgccgatagtggtcgatgtacttcaacataacgcatcccgttaggttccacggaatatttcaccggttcgttgatcactttcaccggtgttcccgtccgcacgctggagaataaagctttaatatccggtgcattcatgcgaatacagcccgaactgacgcgcaaaccgacgctgtccggcgcactggtgccatgaatgaggtattcgccattaccatgcgcgaggcgcagtgcgtaacgtcctagtgggttattgggcccggcaggaacgactggtggtaatttaatgccacgctccagcgaacgttgacgaatgcccgccgtaggcgtccaggttgggttagggattttctgccccacacgcgtttccatcaccggcgtttccagcccctgcaaaccaatacctatcggataaacctgcacgatattttctcccggcggataataataaaggcgcagctctgcaaggtttacaataatcccctgacgcggcgcatcaggtaataatagttgtgaaggaatagttatcgtcgtaccgggttttggcaccggggcgatagtgttattggcttcaaggatcaacattgccgcagtatcaaaacgtcgggcgatggcctgaaggtttttatccccttcttgcaccgtatacgtttgattttgcccaaccagtcgactgccggttggtggtagcggataatcaaccgcccaggcagcctggatggcgctaaaagcgccgataagcgtgagtgtaagcaaagacgcgcgtttcattgtaaacctcctgtatttgccggagactcacgctgaaacgtcggatggcgcttatgttcacctgaaaccaaaacactcctgtgcaggccagtgtaaacattgaccacccggcaatgtgagccaaccggatgaaagctgtccctttagtttagctaagtgcagcggctttggcgcgaattgcgcgaatcatcgcttccagaccttgtgagcgtgatggggtgagatgttgggtgagcgccattttttcaaaccacgggcgcacatcgaaattgacaatatcctgcggcgtcatttgatcgtaaagaataaagacgaccgcaataagcccttttacaatggccgcatcgctgtcgccctgcaattcaataattccctgcgcattctggcgcattacaatccacacctgactctggcagccctggatgctattttgcgggcttttgtcttcgtcacgtaattctggcagacgctgacccaactcaataatgtagagatatttctcttcccagttggcgcagcgtaaaaaattacgcagcaatttttctttatccggcaataaagccatagtgcctccctgttatcccagcagacggtgaatacgttgcaggccggtcacgagacgatccacttcttcatgggtgttatacatggccagcgacgcccgacacatcgcagggacgttgtaataggccattaatggcattgcgcagtgatgtccggtacgcacagcaatgccgtaattatcgagaaaactgccaacatcataggcgtggtgtttaccgagattaaaagcaataacgccaagtctgtccggcggaccatagagcgtaagatccggcaccgctgccaactgcgacaatgcgtaatgcatcagattttgttcatactcggcaatgttgttaagccccagcgccgaaacatactccagcgccgcgccaaggccaataatacctccggtattgggcgtaccggcttcaaaccgccacggcgctttggtccaggtagtgccttcactcaggctaacggtggcaatcatagaaccgcccccttcccacggcggcatctcctgcaacaaggcttctttgacataaagaatgccaattccggtagggccatacagtttatgcccggagaacacgtaaaaatcgcaatccagcgcctgaacatccaccggatgatgcatcaccgcctgagcgccatccaccagcacttttgcgccatgttgatgcgcaagtgtgatcatctccgccagcggattttctgtcccaagcacgttggagacatgagtaattgccagcaggcgagttttctcatcaaacagcgtaggcagcgtctccagttgcagagtaccgtcggggttgagcgggatcacacgcagctctgcgccaacgcgtgcacaaagcatctgccaggggacaatgttagcgtggtgctccatctgactgatgatgatgttatcgcccgcccgcacattgctgttgccccagctattggcgaccagattgatcccttccgtcgtaccgcggacgaacaccagctcttccgccgaacgggcattaataaacagcgatgcccgcttgcgcacgttctccattttctcggtcgcctgggcgcttaaggtatgaataccgcgatgcaccgccgcgtagccatgacgataaaactcagcctcggcatcaatcacctggctcggtttctgcgcactggcggcgctgtcgagataagccagcggcaaaccgttcacctcacgcgaaagcaccgggaaatcggcccgcaccttatcaacggaaaaagtcatcttgcacctcctggcagccgttgaccgattcgggccagcacctgctgtttaagcccttcatcacgcagtgcttccgtcagttcggcagcaaaggcgtaaatgatcatctgctgggcatcctgctgattgatcccgcgcgagcgcagatagaacatctgttcatcatcaatacgccccaccgtcgcgccgtggctgcatttcacatcatctgcatagatttccagctgcggtttcgtatccacttccgccagtttgcccatcagcagattattgttggtcatctgaccatccgttttgatggcgtgctgcgcgacgttgatcaaaccgttaaataccgcgcggcctttgtcgctgacgatagttttgtgcaactgtcggctgttacaaaaacctttattgtgttccagccaggtacgagtatcacacacctcgtttttcaccggcatcgccaggctattgatccgcaccgtgctgttttcgccattgagttgcgtactggtgttgtgtcgtaacactgcgccacccagcaggaaactgtggctaaatgcggtggcatcatcagccagcaacaaatcgttatgagcaaagtggtgactgagcgggttttcaaacgccagcttgatatgctgcaaatgggcgttcgctgcgacgttgatagtgaaccgtgcgccggtgaagtgacgagcatcattaaggctgacaaaatgttcgatcaccgttgcttcggcaccttccgccagatccagatgatgccggtaatgggcagtattcacctcttcacctgccacgccctgggtgatatgcattaacagcaatggctttgccggccgttgaccgcgcttcacggcgatatgcgtcacgctttgtgccaggctttccgtcaaatgcagaaacacttccgcctgaatagcgtcgggtaacccctgacggtcgtcgttaatgctcacttcatatccgctgccttcagttgcatcgctcagtgcgggcacgtaacgtccatcgacaaacaccagccgcacggcgtctaacgttaacgctaaggcatcacgctgctgtggggctatctcccccgcaatgctgacaaactggctattggtcagcccgtccagcggcgtatatttccagttttcatgtttacgtgtcggcagtccggtacgcagcaattgttgtaaatgctgctgtgcttgcggggagcgtttcgccccttcagcttcaaacaaatgattccactgttgcagtgcgttactgctgttcggtaagccagccataaccctgctcctccagttgtttgaccaacgtgaaatcgccggatttcacaattcgtccctgatacagcacatggacgtaatcaggcttgatgtagtcgagaatgcgttggtagtgcgtaacaatgatgaatgaacgcttgccgtcacgcagcgagttcacgccatcggcaaccacttttaatgcgtcaatatccagcccggagtctgactcatcaagaatgcataactccggttccagcaccgccatttgcaaaatatcgttgcgctttttctcgccgccggaaaaaccaacgtttaccgaacgggttaataaatcttccggcatcttcaggagagcgattttctcttccatcaaatcctgaaaatcaaagcggtcgagcgtttcctggccgcgatagctgcgcaccgcattaagtgccgtttgcaggaaaaactggttactgacgccgggaatttccaccggatactggaaggccataaagatgccttcacctgcacgatcttccggcgacagcgcaagcaaatctttgcctttaaactcaaccgtgccgctcgtcacttcataatcttctcgcccggcaagcgttgccgataaggtacttttgcccgaaccattgggccccataatggcgtgaacttcgccgggacgaacgtcgaggcttaatccacgcaggatagctttatcttccacgctgacgtgtaaatctttaatacttaacatgtttattccttatccgacgctgtgttcaagactgatggcgaggagtttttgtgcttcaacggcaaattccagcggcagttccgagaacacgtctttgcaaaaaccgttaacaatcatcgagatggcatcttcttcgctgatcccgcgttgcaggcagtaaaacagttgatcttcaccaatacgtgatgtcgttgcctcgtgctccagctgagcgctgttattgcgacattcgacatacgggaaggtatgcgccccacaattagcgccaatcagcattgaatcgcactgagtgaaattgcgcgcattggttgccgtcggcatgattttcactaagccgcgataactgttctgactatgtccggcagagatccctttcgatataatggtcgatttggtgtttttaccgatgtggatcatcttggtgccggtatccgcttgctgatgaccgctggtcagcgccactgagtaaaactcaccaatggagttatcgccgcgcaaaatgcagctgggatatttccacgtaatcgctgagccggtttctgattgcgtccatgacattttgctgttttcgccttcgcacaaagcacgcttggtgacgaagttgagaataccgccggtgttgttatcgccagggaaccaattttgtaccgtggaatatttcacctcggcgtttttatggatgatgacttccaccaccgccgcgtgtaactgatagctgtcacgcaccggagcggaacagccttcaatgtagctaacgtagctgtcttcgtcggccaccagaatggtgcgctcaaactgcccggttttttccgcgttaatgcgaaaataggtggaaagttccatcgggcaacgcacgcctttaggcacataaataaacgtaccgtcagaggctaccgccgcattaagtgcggcaaagaagttgtcattccccggcaccacggtgccgagatatttacgcaccagttccgggtgatcgtggatcgcctcgccaaaggaacaaaaaataattccctgctccgccagtttttcgcgataagtagtggcaaccgaaacagagtcgaaaatggcatccactgccacctctttgccttcccgcacgggaacgcccaactgctcaaacgccgcctccacctctttacttaaaaaggcgttcgcgccagtttgctgcaccgcgccgggttcagacgcgcagttgtcgtcacaattaccgcacgatggtgccgagtagtagctgtaatcctgataattcagcttgtcgtagtgcgctttcaaccagtgcggttcttccatctccagccatgcgtgataggcgttgagacgaaactccagcatccactccggctcattacgcttcgccgaaattgcgcgcaccacctcttcgtttatcccctttgccagctcatcggtggctaactgggtgaagaatccttctttataattcagcgggccgccggtccaggttttgacatcgtcagttgcttcagtattacgagacatagtaccgcctataccccaaagctttcgccacagccacattcattctgggctttagggttgtgaaatttgaatatctgattaagtccttcgcgaacgaaatcgacttccgtgccatcaataaaaggcatcgcttgcagcgggacaaacagcttcgcgccgtcgtgttcaaacagcagatcgtctttgtccggctcgctaacactgtcgagcacatagccaaagcccgcgcagcctgtttgcttaacgcctaagcgcacgccgatcataccaggctgctttgccaccagttcgcggatgtgtatcgccgctgcgggtgtcagcgttaagccttgccaggcgaaatcctgtggattaaaggttcctgaatgcatgtccatcgatttacctcacttcatcgctttcagcgtataacagcatgttagtgataatgattatcagttcaacccagcaaacgcaggggctttagcgtaaaacatgctttttacctgcttttaataagcatagaccctgatttgtgggttaacaggcacgctaagaattaggtatctcattgttagataatgattattatctaaggagcattaaggctgtgatgaaaaagaaaaagttgcattgaaaatgactatttaagagataggtaaaaaagtgcagcgttcagaaataagaaaacccttaagtctgtgcgacacaggcttaagggtttctaccccatccggcgcttatctccggcactcacagtggcttagctcttgaaggggcgataaggataatctcataaagctaacccactgttttaacacaaactgcgatttgtattatttttgaacgttatcaggcgggtagataggctgtattaaaaaggccctcgaacctggacgaagattaatccaggccgatttggcgaactcgcgacattaaatcaggatcaatgcacgcccagacgccaggcgaagtagatttcttcttttaattcagcagaagagagagtaagcaggtcagcaaattcaagttctaattgtttcagacgcttgagatattgggcaggtgaaagattgctttggtcacggcgtaaaaattcaatggccagttgggtgggatcaagttgagtagacatagcatcctcgcttttagacaagacctgcacagtataccaccgtttactgtgcagataataaccaaaagcaatatgcgtcacacttttctggtgacaacgtcacaaaatagcggtcgtcaatcgtgacgaacagcacaaacgccctttctcatcgaagatttcaatctgccagacctggtgacgcgaaccgagatgcaacggtttgcatacgccgcgcacccgcccttctcgtgccgagcggacgtggttagcattgatttccagaccaaccactttttgctcaccttcggtacataaataaccggcaacggaaccgatactttcggccagtaccacggatgcacctccatgcagcaacccgaaaggctgctttgtccgtgagtctactggcattgtcgcttcaagggtgtcatcaccaatatgttcaaagcgaatatccagcaatcccaccatgtttccttcccccatagcattcagtgcttccagggtgatttttcgtttccatatcatttaataatctccagtaaagcctgcacaggatggcgtacccctgtgccttcaacccgttttacctgactacggcaggaatatccggtcgccagacagcggttacgcggcagtcgctgcatagcctgatgccaggataattcatagatcccgagcgaatttttatggtttttcgcttcatgtccgtaagtccctgccatgccgcagcaccccacgctgacattttccagtttcgcgccaaaacgggcaaatattgccgcccattgtgctggcgcgcctggcaaggcggtaacttcggtacagtgaccaaagaaataccatgattcaccgctgactgtagccactggctgtgagtcaagtgcgcttgccagccattcatttgccagtaagacgttaaactcgccacgctcctcgcccagagccagtttatattcatcgcgataacaaagtaccagcgccgggtcgacgcctaccattggcatacccagcttcgccatacggttgaggaaatccgccgtctttttcgccgtcttcgcaaaacgattaagaaaacctttgatatgctgggcttttccatttggcgaaaatggcagtaacacgggctggaaacctaatttttcgaccagacggacaaaatccgccaccacttgagcatcgtaatagctggtaaaggggtcctgcaccaccagcaccgtgcgcgctttctgctctgcattgagagcttcaagctgttccagcgtcatgtttgccgagcgatgccccaccatttgttgttgtagcgaggggaccgacagcagcggcaaatcaaccatgccgatatgtttttccgagagtttgcgcaccagcggctggttaatgaagaagttaaaggttttcggcgcgcgtgccatcagcggtgcgtaactctcaaccgtagcgacgaggtggtcgcgcagcgggcgtaaataacgggtgtgatagagttgcaggaaacgagagcgaaactccggcacatcaattttgatggggcactgagtcgaacaagctttacaggccagacagcccgacatcgcctctttgacttcgtgtgagaagtcatattcgcctttattcgcatgccaactattgcgcgtgcgggcaattaacgtccgcaaactgacgccggattcaggcagttcttgttccagtttgagtgggtcaacgccgcgatccgccaacaaacgcagccattcacgtaccagcgttgcgcgccctttcggtgaatgaatccggttctgggtgatcttcatcgacgggcacatcggactacgagcatcaaagttgaagcataaaccgttgccgttacactccattgcaccacgccactgctggcgtaccgcaatggggatctgtcgatcgaatgtaccgcgcttcaccgcgtccactttcatcatcggcgcatcgagaccttctggcgggcaaatcttcccggggttgagtcggttatgcggatcaaacgccgctttcactttacgcagttctgcaaaaagttcctcaccaaaaaacgccgggctgtattcggcgcgaaaacctttgccgtgttcgccccacaacaaaccaccgtatttcgcggtaagcgccactacatcatcagagatttgcttcatcaaaatctcctgttgcggatcgcacatatccagtgctggacggacgtgcaagacacctgcgtcgacgtgaccgaacataccgtagcttaagccgtggctgtcgagcagcgcgcgaaattcagcaatataatccgccaggtgttccggcggtacgcaggtatcctcagcaaacggaattggcttagcagcacctttggcattgccaagcagaccaacggcttttttgcgcatcgcatagatacgttcaacacccgccagctcgcggcacacctgccagccgatcactcctgcctgttggctggcaatcagctcatcaagccgcacacagagtgcattaactcgctcgtcaatcagtgcctcatcatcaccggcaaattccacaatgttcagcccgagcatctctttatcaggcacatcggtaatcaactcgctgacggaatgccagacaatatcttcccgcgccagattcagcacttttgagtccaccgtctctaccgaaagcgcccgcgcctcaaccataaacggcgcgttacgcagcgcggagtcaaaagagtcatatttgacgttcaccagacggcgtactttaggcaagcgcgtaatatccagtcgcgcttcggtaataaaggccagcgtcccttctgaacccgtcagaatgcgcgtcaggtcgaactcggtcatctcatcgttaaagacatgacgcagatcgtaaccggtaagaaagcggttaagcttggggaagttgtcgatgattaactggcgttgctgacggcaacgttgataaaccgtgttataaattcgcccgattgtggtattggatttacccagcgtttccgccagttcgacgggtaaaggttgcgtatcgagaatatcgccccccaacaacaccgcgcgtacgccaagtacgtgatctgacgttttgccatagaccagcgatccctgaccggatgcatcggtattgatcatcccgccgagcgttgcccggttgctggtcgaaagttctggcgcaaaaaagtagccaaagggtttcaggtactgattgagttggtctttaatcaccccggcctcaacgcgcacccagccctcttcagggttaatttcgatgatgcggttcatatggcgggacatatcaacaataatcccctggttgagcgcctgaccgttagtgccggtgccgccgccgcgaggggtaaagatcaacgatgaatagcgttcctgcgcggcaagacgggcaattaacgccacatctgcggttgaacgcggaaataccaccgcatcggggagaagttggtaaatactgttgtcggtcgacattgtcagacgatcggcatagcttgttgccgtatcgccggtaaaaccctgttgctccagctcttgcaaaaaattaagcaccagttgaacgacgccgggtgcctgggaaatctgtggaatcattatattgaccctttcctgcggtctgtgatgagagattaatcgtttgcgtgttgcctgagttgttgtaccacatttttttcttacacgcccatcagaattaagggcagaatcgacctgttaaaaaccgctgaaattgctcatcattatgcaggtgagtttcgcgtgttcacgtcgcgtcgacgatttgacgcacaaaaaaggtgaaaagtagttatggtaaatgttcgtcagcccagggatgtcgcacaaattctgctttcggtgctgtttttagccatcatgattgtggcatgtctgtggattgtacaaccctttattctcggctttgcatgggccggtacagtggttatcgccacctggccggtattgttacgtttgcaaaagatcatgtttggtcgccgctctctcgccgttctggtgatgacgctgttattagtgatggtgtttatcatccctattgctttgctggttaacagtatcgtcgacggcagcggcccgctaattaaagccatttccagtggtgacatgacgttacccgatctggcgtggcttaataccattccggtgattggcgcgaagctatatgcaggctggcacaatttgctggatatgggggggacggcgatcatggcgaaagtccgtccttatattggcaccaccaccacctggttcgttgggcaggcggcgcatatcgggcgctttatggtgcattgtgcgctgatgcttctcttcagcgccctgctgtactggcgcggtgaacaggtggcacaaggcattcgccattttgcaacccgtctggcaggcgttcgcggagatgccgccgtgctgctggcggcacaggctatccgcgcggtggcgctgggtgtggtggtgacggcgttagtacaggcagtgcttggcggtatcggcctcgccgtatccggcgtaccttatgcaactttgctaacggtgttaatgatcctctcctgccttgtccagcttggaccgttgccggtactgattccggcgattatctggctctactggactggcgataccacctggggaacggtactgttagtttggagcggtgtggttggcacgctcgataacgtcatccgcccaatgttaattcgcatgggtgccgatttaccgctgatcctgattctctctggcgttattggtggtttgattgctttcgggatgatcggcctgtttattggtccggttctgttagccgtttcctggcgtctttttgccgcgtgggtggaagaagtcccaccgccgacggaccaaccggaagaaattctcgaagaacttggcgaaatcgagaaatcgaataagtaatttctcatcaggcggctctgccgcctgattgttaacccctgctaattgatatttgcttgctcttccccatattttcctgcttaccgccattcagctggtagtacctgtcgcaaattctttacagtttttaaactaatgagacgaatctgatcgacgcaaaaagtccgtatgcctactattagctcacggttataaatcaacatattgatttataagcatggaaatcccctgagtgaaacaacgaattgctgtgtgtagtctttgcccatctcccacgatgggcttttttttaacatttttccgcttcgctacctcgcccctcactctttccaataatgttgcacaagatactgtgactctcttcaagccgtcagcaggctgataatgttatttatattttattgtttatttcatgcagccattacacgatgaacgcttatgaactccaggcacttcgccatatttttgccatgactattgatgaatgcgcgacctggattgcccagaccggtaacagtgaaagctggcgtcagtgggaaaatggcaaatgcgccattcctgattgtgtagtcgagcaactgttggctatgcgtcagcaacgaaaaaaacatcttcatgccatcatagagaaaataaataaccgcatcggcaacaacaccatgcgttttttccccgacttaaccgcgtttcaacaagtctaccctgatggcaattttattgactggaagatctatcaatcggtagccgctgaattatatgcacacgatctggagcggctttgttaatttctccacagaaaggaattgtcgttgttacaacaataatgaacggatactgacacaacatcgctacactttttaaagcacctttgctaagtagaacctatgaaaaatccctattaccctaccgcacttgggttgtattttaattacctggtgcatggtatgggcgtcattttgatgagcctgaatatggcctcgctggagacgctttggcagactaatgccgcgggcgtctcgatagttatctcatcactgggcattggtcgattaagtgtcttgctttttgcaggattattatccgatcgctttggtcgccgcccttttatcatgctcgggatgtgctgctatatggccttcttttttggcatcctgcacaccaataacatcattatcgcttatgtttttggctttctggcgggaatggcaaacagttttctcgatgcaggcacctatcccagtttgatggaagcttttccacgctcaccgggtacagccaatattttaattaaagcatttgtttccagcggacagtttttattaccgctaattatcagcctgttagtgtgggctgaactgtggttcggttggtcctttatgattgccgcaggcattatgtttattaacgctctgtttttataccgttgtacgttcccaccccatccgggtcgtcacttacctgtcataaagaaaaccaccagctctacggaacatcgctgttcaattatcgatttagccagttattccctatatggctatatctcaatggcaacgttttatctggttagccagtggctggcacaatacggacaatttgtcgctggcatgtcatacaccatgtcgatcaaattactcagtatctacaccgtgggttcgctgctgtgtgtatttattactgctccacttattcgtaataccgttcgcccaacaacattactgatgctgtacacctttatctcatttatcgccctgctcaccgtctgcctgcatcccacattttatgtggtgataatatttgctttcgtcatcggttttacctccgcaggcggtgttgtacaaattggcctgacgttaatggcggaacgttttccctacgctaaaggaaaagcaacggggatctattacagtgctggcagcattgcaacatttaccattccgttgattacggctcatctttcgcaaagaagtattgccgatattatgtggttcgataccgccatcgctgctatcggctttatactggcactgtttattggcttacgcagtcgcaaagaaacgcggcatcacacgctaaaggaaaatatcgctccgggtgggtaatgcaatattcttttcaggttatgcaagatcttacggataaataactctttctgcgctaactaaggaaaatcgcgatcaaaaacaaactatgacatgcaatattcctggaaacataaactttatgccatgtacccagggaaaatcatcttcagtatagtaattatgtaaaccgtcggagaacaatacgtacggtaacgaaattatctttcagcaaggagctgtgaaaatgtctcaaaataaggctttcagcacgccatttatcctggctgttctttgtatttacttcagctatttcctgcacggcattagtgttattacgcttgcccaaaacatgacatctttggcagaaaagttttccactgacaacgcgggcattgcctatttaatttccggtatcggattggggcgattgatcagtattttattcttcggagtgatctccgataagtttggtcgtcgggcggtgatattaatggcagtaataatgtatctgctattcttctttggtattcctgcttgcccgaatttaactctcgcctactgtctggcagtgtgcgtaggtatcgctaactcagcgctggatacgggtggctaccccgcgctcatggaatgctttccgaaagcctctggttcggcggtcatactggttaaagcgatggtgtcattcgggcaaatgttctacccaatgctggtgagctatatgttgctcaataacatctggtacggctatgggctgattattccgggtattctgtttgtactgatcacgctgatgctgttgaaaagcaaattccccagccagttggtggacgccagcgtagctaatgaattaccgcaaatgaacagcaaaccgttagtctggctggaaggtgtttcatcagtactgttcggtgtagccgcattctcgaccttttatgtgattgtggtgtggatgcccaaatatgcgatggcttttgctggtatgtcagaagctgaggcattaaaaaccatctcttattacagtatgggttcgctggtctgtgtctttatttttgccgcactactgaaaaaaatggtccgtcccatctgggctaatgtatttaactctgcactggcaacaataacagctgccattatctacctgtacccttctccattggtgtgtaatgccggagcctttgttatcggtttctcagcagctggcggcattttacagctcggcgtttcggtcatgtcagagtttttccccaaaagcaaagccaaagtcaccagtatatatatgatgatgggtggactggctaactttgttattccgctgattaccggttatctgtcgaacatcggcctgcaatatatcattgttctcgattttactttcgcgctgctggccctgattaccgcaattattgtttttatccgctattaccgcgttttcattattcctgaaaatgatgtgcggtttggcgagcataaatttagcacccggttaaacacgattaagcatagaggttaaaggagttaattatggatgttaccgcaaaatacgaattgattgggttgatggcctatcccatccgccacagtttatcgcccgaaatgcagaataaagccttagaaaaagcgggattgccatttacctatatggcctttgaagtggataacgatagttttcccggagcaattgaaggattaaaagccctcaaaatgcgcggaactggtgtatcaatgccgaacaaacaactggcgtgtgaatatgttgatgaattaacgccagcagccaaactggtgggtgccatcaacaccatcgtaaatgatgatggctatctgcgtggctataacaccgacggcacgggccatattcgcgccattaaagagagcggttttgatatcaaaggcaaaacgatggtgctgttaggggccggaggtgcctcaacggcaattggcgcgcagggggcaattgaaggtttaaaagaaattaaactctttaaccgtcgggatgagttcttcgataaagccctcgccttcgcgcagcgggttaacgaaaacaccgattgcgtcgtgacagtcaccgatctcgccgatcagcaagcctttgctgaagccctggcttccgccgacattttaaccaatggcaccaaagtgggtatgaaaccccttgagaatgaatcattggttaatgatatcagtctgttacatccgggacttctggtcactgaatgcgtgtataacccgcatatgacgaagttattgcagcaggcgcaacaagcgggttgcaaaacgattgatggatacggcatgttgttgtggcaaggggctgaacagttcacgttatggactggcaaagatttccctctggaatatgttaaacaggtcatggggttcggtgcctgacaggctgaccgcgtgcagaaagggtaaaaaatgaaaaccgtaactgtaaaagatctcgtcattggtacgggcgcacctaaaatcatcgtctcgctgatggcgaaagatatcgccagcgtgaaatccgaagctctcgcctatcgtgaagcggactttgatattctggaatggcgtgtggaccactatgccgatctctccaatgtggagtctgtcatagcggcagcaaaaattctccgtgaaaccatgccagaaaaaccgctgctgtttaccttccgcagtgccaaagaaggcggcgagcaggcgatttccaccgaggcttatattgcactcaatcgtgcagccatcgacagtggcctggttgatatgatcgatctggagttatttaccggcgatgatcaggttaaagaaaccgtcgcctacgcccacgcgcatgatgtgaaagttgtcatgtccaaccatgacttccataaaacgccggaagccgaagaaatcattgcccgtctgcgcaaaatgcagtccttcgacgccgatattcctaagattgcgctgatgccgcaaagtaccagcgatgtgctgacgttgcttgccgcgaccctggagatgcaggaacagtatgccgatcgtccaatcatcacgatgtcgatggcaaaaactggcgtaatttctcgtctggctggtgaagtatttgggtcggcggcaacttttggtgcggtaaaaaaagcctctgcgccagggcaaatctcggtaaatgatttgcgtacggtattaactattttacatcaggcataagcaataatatttcggcgggaataccctctcccgccgaactaaaaagagtatttttaaccgtatttaataaaaatatttcgtgagtctctgtgcgctaattctccatctggcgtagggaaaatcacacctgaatcaggaattaacaatgaaacctgtaaaaccacctcgtattaatggacgagtgccggtcctgtcggcacaggaagcggtgaattatattcccgacgaagcaacactttgtgtgttaggcgctggcggcggtattctggaagccaccacgttaattactgctcttgctgataaatataaacagactcaaacaccacgtaatttatcgattattagtccaacagggcttggcgatcgcgccgaccgtggtattagtccgctggcgcaagaaggtctggtgaaatgggcattatgcggtcactggggacaatcgccgcgtatttctgaactcgcagaacaaaataaaattattgcttataactatccacaaggtgtacttacacaaaccttacgcgccgccgcagcccaccagcctggtattattagtgatattggcatcggaacatttgtcgatccacgccagcaaggcggcaaactgaatgaagtcactaaagaagaactgattaaactggtcgagtttgataacaaagaatatctctattacaaagcgatagcgccagatatcgccttcattcgcgctaccacctgcgacagcgaaggctacgccacttttgaagatgaggtgatgtatctcgacgcattggttattgctcaggcggtgcacaataacggcggtattgtgatgatgcaggtgcagaaaatggttaagaaagccacgctgcatcctaaatctgtccgtattccgggttatctggtggatattgtggtggtcgatccggatcaaacccaactgtatggcggtgcaccggttaaccgctttatttctggtgacttcacccttgatgacagtaccaaacttagcctgcccctaaaccaacgtaaattagttgcacggcgtgcattattcgaaatgcgcaaaggcgcagtggggaatgtcggcgtcggtattgctgacggcattggcctggtcgcccgggaagaaggttgtgctgatgactttattctgacggtagaaacaggtccgattggcggtattacttcacaggggatcgcctttggcgcgaacgtgaatacccgcgccattctggatatgacgtcccagtttgatttttatcacggtggtggtctggatgtttgttatttgagttttgctgaagtcgaccagcacggtaacgtcggcgtgcataaattcaatggtaaaatcatgggcaccggtggatttattgatatcagttccacttcgaagaaaatcgtgttctgcggcacattaactgcgggcagtttaaaaacagaaattaccgacggcaaattaaatatcgtccaggaaggacgggtgaagaaatttattcgggaactaccggaaataactttcagcggaaaaatcgctctcgagcgagggctggatgttcgttatatcactgagcgcgccgtattcacgctaaaagaagacggcctgcatttaatcgaaatcgctcctggcgtcgatttacaaaaagatattctcgacaaaatggatttcaccccagtgatttcgccagaactcaaactgatggacgaaagattatttatcgatgcggcgatgggttttgtcctgcctgaagcggctcattaacaggagtataatgatggatttctctttaactgaagaacaagaactgctgctggccagtattcgcgaactgattacgactaactttccggaagagtatttccgcacctgcgatcaaaacgggacatacccgcgtgagtttatgcgggcactggcggataacggtatttccatgcttggcgtgccggaagaatttggtggtatccctgcggattacgtcacccaaatgctggcgctgatggaagtgtcaaaatgcggtgctccggcatttttgattaccaacggtcaatgtattcacagtatgcgccgtttcggttctgcagagcagctacgtaaaacggcagagagcaccctggaaacgggtgatcccgcctatgccctggcattgacggagccaggcgcaggctcagacaacaacagtgccactaccacttacacgcgtaaaaacggcaaggtttacatcaacggacagaaaacctttattaccggtgcgaaagagtatccatatatgctggtgttggcgcgcgatccgcaaccgaaagatccgaaaaaggcctttactctgtggtgggtcgactccagtaagcccggcattaaaatcaatccactgcataaaatcggctggcatatgctcagcacctgcgaagtctatctcgacaacgtggaagttgaagagagcgacatggtgggcgaagaaggaatgggtttcctcaatgtgatgtacaactttgagatggagcgcctgatcaacgccgcgcgcagcaccggctttgccgagtgtgcctttgaagatgccgcccgctatgccaaccagcgtatcgcttttggtaagcccattggtcataaccagatgatccaggaaaaactggcgctgatggcgattaagatcgacaacatgcgcaacatggtgttgaaagtggcatggcaagccgatcagcatcagtcactgcgcaccagcgcggcgctggcaaaactgtactgcgcacgtaccgcaatggaagtcattgatgatgcgattcaaatcatgggcggtctgggctataccgatgaggcgcgcgtctcccgcttctggcgtgatgtccgttgtgaacgtatcggcggcggtacagacgaaattatgatttacgtagcaggtcggcagatcctgaaagattatcagaacaaataatctgcaggcggcgcagcctcttaacaaactgcgccgccagatttatccggcaagacttaccggttgaggaaattcagataggatttcttgttccgcaaaacagtttttaaattgcctgcggtaatcgctgggcgaacagccgacatggcgcaaaaacagtttggcaaagtgatcgacattttcataacccacacgccaggagatctctgcctgagataattcagtattagtgagtgaccatttcgcttccgtcatacgccgttgaataacatagttaataggggaaatacgatactctttggtaaattcatggcagatataactgacgctggcacgaaattttttcgataactgctctaaagtgattttttcgcgatagttattattcagatagaaaagaatatcttttatcagaacatcttttttaatatatccctgctccgaacgataagcatttttaaagttttcgtagtaaagaattgctaacgtataggcaaatgcgtcccataacgaagatgtttggctatttttactttgcggcaaaatcacacttagctcattaaataaggttttaatgacttcttttccctgtcctgcggcaattaccgggcaagaatgcggttgcagtagctgattttcctcagccccctgaaactgaaagccgtacagcgcacaggtacacgtcgttgccggatcgttaacgtcagaggccaccgcatgcaacctgccacgttctatcaccacaatgtcatcggcatgcgcgacatataacgaagaatcgatggtaaaccttgctacccctttcttgacgtaaatcagctcggtttcattgtcatgaacgtgatgtccagactcccattttggatcatcgctaaatgcgaaacgtgaaagccgtggcgttttaccggcgacaaacagcgtttcactggcattatcaaaacagcgttgatacatgacaacctccctattccatgagcaaacaaaaacaatatatgccggataaaatacggcgtgtattgcggttatacaaccgcgtttagcgagagctaaacaagattatttacactgaatgcaagattgcacggtcatggaataactatattgccgcaaattgcacttttgttttagcgatcgcattttttttgcaagattgttggcaaggaaaacagcttgctccgtcgaaaaccccgcaccgctatcgcacactattttcaggccatttttaccttccatcagagatggttccgtatgcgactcacaggagaaatcatgaaaataataacctgctttaagctggtgcctgaagaacaggacattgttgtcactccagaatacaccctgaatttcgacaatgccgacgccaaaatcagccagttcgatctcaatgccattgaagctgcaagccagcttgcaacagatgacgatgagatagccgcgctgaccgtcggcggctctttgttgcagaactcgaaagtgcgcaaagacgtgctatcccgcgggccgcacagcctgtatatggtgcaggatgcacaacttgagcatgcactgcctctcgataccgcaaaggcgctggcgacagcagttgaaaagatcggcttcgatttactgatctttggtgaaggttccggcgacctttatgcccagcaggttggcttgctggtcggagaacttctgcaacttccggtgattaatgcagtgagtgctattcagcgtcagggcaatacactggtgattgaacgcacgcttgaagatgatgttgaagttattgaactctctgttccagccgtgctctgcgtcacctccgatattaacgtaccacgtattccttcgatgaaagccatcctcggcgcgggtaaaaaaccggtaaatcagtggcaggcaagtgatattggctggagccagagcgcaccacttgctgaactgaccggtattcgcgtaccgccgcaaacaaaacgtaagcacatcattctcgataacgattcgccggaggccattgccgagctggcggaacatctgaaaaaagccctgaactgaagcctacggagaagaaacgatgagtcaattaaacagcgtctgggtctttagcgataatcctgaacgttatgctgaactgtttggcggcgctcagcaatggggccaacaggtgtatgccattgtacaaaataccgagcaggcgcaggcggttatgccttatgggccaaaatgcatttatgttcttgagcaaaacgacgcgctgcaacgtactgaaaattacgccgaaagcattgctgccctgctgaaagataaacaccccgctatgttgctgttggccgcgacgaaacgtggtaaagctctggccgcacggttaagtgtgcaactgaatgcggcgctggtgaacgatgccacggcggtggatattgtcgatggtcacatttgcgccgaacaccggatgtatggcgggttagcgttcgctcaggaaaagatcaacagcccgctggcgatcattacccttgcacccggtgttcaggagccgtgcacccgtgatatctctcatcagtgcccgacagaaacggtaccttatgttgccccgcgtcatgaaattctctgtcgcgaacgccgtgcgaaagcggcaagcagcgtggacctgagcaaagcaaaacgtgtggttggcgtcggtcgtggtctggcggcgcaggatgacctgaaaatggtccacgaactggcggcagtgctgaatgctgaagtcggctgttcacgtccaattgccgaaggcgagaactggatggagcgtgaacgttatatcggtgtctccggcgtgttgctgaaatccgatctctacctgacgctggggatctccgggcagatccagcatatggttggcggcaacggcgcaaaagtgattgtcgccattaataaagataaaaatgcgccaatcttcaactatgccgactacggtctggtgggcgatatctacaaagtcgtccctgccctgattagccagttgaatcgctaattccctttcaaccacatctcccgctgtaaacgcagcgggaagggagcataacgcatgtcggatgacaaatttgatgccattgtggtcggtgcgggcgttgccggtagcgttgccgcactggtcatggcgcgagccgggctggatgtcctggtgatagaacgcggcgacagtgccggatgtaaaaacatgaccggcgggcgtctttatgcccacacacttgaagcaattattccaggctttgcagcatcagcgccggtagaacgcaaggtcacacgcgagaaaatctccttcttaaccgaagaaagcgccgttaccctcgattttcaccgcgagcaaccagatgttccgcaacacgcgtcttataccgtattgcgtaatcgtctggacccgtggttgatggaacaagccgagcaggcgggcgcgcagtttatcccgggcgtacgcgtcgatgcgctggttcgtgaaggaaacaaggtcactggcgtccaggccggggatgatattctcgaagcgaatgtggtgattctggctgatggcgttaactcgatgcttggccgctcgctgggaatggtttccgcttccgatccgcatcattacgctgttggtgttaaagaggttataggtctgacaccagaacagatcaacgatcgctttaatgttacgggcgaggaaggtgccgcctggctgtttgccggttccccttctgacggcctgatgggcggcggattcctctataccaacaaagattccgtatcgttggggctggtttgtggattgagtgatatcgcccatgcgcaaaaaagcgtgccgcaaatgctggaagattttaaacaacaccccgccattcgcccgctgattagcggcggcaaactgcttgaatattccgcgcatatggtgccggagggcggtctggcaatggtgccgcagctggttaacgatggcgtgatgatcgttggtgacgccgcaggcttctgcctgaatttgggttttacagttcgcggcatggatttagccattgcatcagctcaggctgccgccacaacggtgatcgccgccaaagaacgcgcggatttctccgccagcagtctggcgcaatacaaacgtgagctggaacaaagttgtgttatgcgcgatatgcagcatttccgcaagatcccggcgctgatggaaaacccgcgcctgtttagccaatacccacgaatggtcgccgacatcatgaacgatatgttcaccattgacggcaaaccaaaccagccggtacgcaaaatgatcatgggacacgcgaagaaaattgggctgatcaacttgctgaaagatggcattaagggagcaaccgcgctatgagccagaacgctacggttaacgtcgacatcaaattaggcgtcaataaattccatgttgatgagggccacccgcatatcattttggcggcaaatcccgatatcaatgaattccgtaaattaatgaaagcttgccctgccggactttataagcaggatgacgcaggaaacattcatttcgattccgccggttgtctggagtgcggcacctgtcgggtgctgtgcggcaacactattctcgaacagtggcaatatcccgcaggcaccttcggtattgaatttcgctacggctaatcatgcatcccacaggcccgcatctcgggcctgatgttctgtttcgagagtccaaaatgaaagtgacattaacgttcaacgaacaacgtcgtgcggcgtatcgtcagcaagggttatggggcgatgcttcgctggccgattactggcagcagaccgctcgtgcgatgccagacaaaattgccgtggtcgataatcatggtgcaacgtacacctatagcgcgctcgatcacgccgcgagctgtctggcaaactggatgttagcgaagggtattgaatcaggcgatcgcatcgcatttcaactgccaggctggtgtgaatttaccgttatctatcttgcctgcctgaaaaccggtgcggtttccgtgccgctgttaccttcctggcgggaagcagaactggtgtgggtgctcaataagtgtcaggcaaaaatgttctttgcaccgacgttgtttaaacaaacgcgtccggtagatttaatcctgccgctgcaaaatcagcttccacaactacaacaaattgtcggcgtggacaaactggctcccgccacctcttccctctcattaagtcagattctcgccgacaatacccctctgaccacggcgataacgacccacggcgatgaattagccgctgtgctatttacctccggaaccgagggtctgccaaagggtgtgatgctaacgcataacaatattctcgccagtgagcgggcttattgcgcgcggctaaatctgacctggcaggatgtctttatgatgcctgcgccacttggtcacgcaacgggctttctgcatggcgtaacagcaccttttttgattggtgctcgcagcgtgttgttagatattttcactcctgatgcgtgtctcgcgctgcttgagcagcagcgttgcacctgtatgctcggcgcaacgccgtttgtctatgatcttttgaatttactagagaaacaacccgcagacctttcagcgctgcgcttctttctttgcggaggtaccacaatccccaaaaaagtggcgcgagaatgccagcagcgcggcattaaattattaagtgtttatggttccacagaaagttcgccgcatgcggtggtgaatctcgacgatcctttgccgcgctttatgcacaccgacggttacgctgccgcaggtgtagagattaaagtggtcgatgacgcacgcaagactttaccgccaggttgcgaaggtgaagaagcctcgcgtggccccaatgtgtttatggggtattttgatgaacctgaattaactgcccgtgcgctggatgaagaaggctggtattacagcggcgatctctgccgcatggatgaggctggctatataaaaataaccgggcgcaagaaagatattattgtccgcggcggcgaaaatattagcagccgtgaagtagaagatattttattgcagcatcctaaaattcacgatgcctgtgtggttgcgatgcccgatgaacgtttaggtgaacgttcatgcgcttatgtcgtgctgaaagcgccgcatcattcattatcgcaggaagaggtggtggctttttttagccgtaaacgggtcgcaaaatataaatatcctgaacatatcgtggtaatcgaaaaactaccgcgcactgtctcaggtaaaatacaaaagtttttgttaaggaaagatattatgcggcgattaactcaggatgtctgtgaagagattgaataagtttcatcttcggggatcacataaacccggcgacaaaacgccgccgggtatttattttatttcttcagttcagccaggcttaaccaggtttgcaccacggtgtccgggttcagagacaggctatcgatcccctcttccatcaaccatgcagcaaagtcttcgtggtcggatggaccctgaccgcaaatcccgacatatttgccctgtttcttcgcggcacgaatcgccatcgacagcagtgctttcaccgcatcgttgcgctcatcgaacagttcagacaccacgccggagtcacgatccagaccgagcgccagctgcgtcatgtcgtttgagccaattgagaagccgtcgaaatattccaggaactgctctgccagcaaggcgttggacggaatttcacacatcatgatgattttcagcccgttctcaccacgtttcagcccctgatgcgccagttcctcaaccaccgctttcgcctgatcaacggtacgcacgaacgggatcatgatctcaacgttagtcagccccatgtcgttgcgcacacgtttcactgcttcacactccagcgcgaagcagtcgcggaagctgtcggaaacatagcggcccgcgccacggaagccgagcatcgggttctcttcatctggctcgtaacgctcaccaccgaccagattggcatattcgttcgatttaaaatcagagagacggacaatgacgcgcttcggataaaacgcggcacccagcgtcgcgatcccttcagtcagacgaccaacgtaaaattcacgcggagaatcaaaacctttcatcatctcgcggatttcgttttgcaactgcggttcctgatcgtcaaactcaagcagtgcgcgtgggtggacgccaatcatacggttgatgataaattccagacgcgcaaggcccacgccttcgttcggcaggcaggcgaagtcgaaagcacggtccgggttaccgacgttcatcatcaccttcaacggcaggtccggcatcgtttctacgctggagcttttcacgctaaattccagcaactccgcatagacgtaaccggtatcaccttcggcacaagaaacagtgacgttctcgccgtctttcatccgttctgttgcatcaccacagcccactaccgccggaatgccgagttcacgagcgatgatcgccgcgtgacaggtacgaccgccacggttggtgacgatggcagatgctttcttcatgatcggttcccagtccgggtcggtcatgtcagtaaccagcacgtcgccaggttcgatgcggttcatttcgctgatgtcatggatgactttcaccggacccgcgccgatgcgatgaccgatagcacggccttcggcgataatcttaccctgtgaatgcagcgtataacgctccatgacctgaccgcgtgagcgcacggtttccggacgcgcctgcacaatgaacagtttgccggtgtggccatctttcgcccactcaatatccatcgggcgaccgtagtgtttctcaatttgtacggcctgttttgccagttcctgcacttcttcgttggtcagcgagaagatgtcacgctgttcctgcggtacgtcttcgattttaacctgcttgccgtgctcctgggtcggcgcgtaaaccatgcggatttttttcgaccccatggtgcggcgcacaatagccgggcgattcgccgcaagtgtcggtttatgcacataaaactcatccgggttaaccgcaccctgcacgaccatttcaccaaggccccatgcggaagtgataaacaccacctggtcaaagccagattcggtatcaatggagaacatcacgccagaagatgcgaggtcggagcgcaccatccgctgaacaccggcggagagcgctacgccacgatggtcgtaaccctggtgcacacgataagagatggcgcgatcgttaaacagagaagcaaatacatgcttcactgccacgagaacggcgtcaaaaccctgaacgttgaggaaagtttcctgctgaccggcaaaagaagcgtccggcatatcttctgcagtagcggaggaacgcaccgcaaacgaagcgttttcgtcatcggcggaaagctgtgcataggcttcgcggatggcgttttccagctcaggctggaagggagtgtcgataatccactggcggatttgcgcgcccgctttcgcaagctgggtaacatcgtcaatatccgttttatccagcagttcataaatgcgctggtttacgccgctttggtccagaaactggttaaacgcgtcggcggttgtggcgaaaccattcggaacggaaacacccattccggaaaggttagtaatcatttcacccagggaggcatttttgcccccaaccctgtctacatcattcatgccgagttggttataccaaagcaccagcggtgacgagccattgttggacatcgaacaatccttttgtgataaatgaacggtttgagaaacacatttctgcgcatttatctttgcatatttaaccggatgaaaaaaacggtgaatcgttcaagcaaatatatttttttactttttaagactgatcccagcgttgcgcaaatctgctctcttcgacaatttccacataaaccatcggtataaacgaaaccataaaaatgaaatgctgttttcataaaaaataaaatttaagtttcattttataaaccagacataacgttctacgcttctgtacgtttttaatttatgctttcatagaattatgtctgcatcacgggaagaacaaaatggataatgctgttgatcgccacgttttttatatttctgatggtacggcaataactgcggaggtattaggacacgcagtaatgtcacaatttcccgtcactatcagcagcattacgctgccgtttgtcgaaaatgagagccgtgcacgggcagtgaaagatcagattgacgcaatttatcaccagacaggtgtgcgcccgctggtcttctactccatcgtgttgccggagattcgcgctatcatcttgcaaagtgaaggcttttgccaggatatcgttcaggcgctggttgccccgctacaacaagagatgaaactggatccaacgccgattgctcatcgtacccatggccttaaccctaataatctcaataaatatgatgcgcgcattgcggcgattgattacacccttgcccacgatgacggtatttcgttgcgcaatctggaccaggctcaggtgatcctgctcggtgtttctcgctgtggtaaaacccccaccagtctgtatctggcaatgcaatttggtatccgcgcggcaaattacccctttattgccgacgatatggataatctggtgctacccgcgtcgctcaaaccacttcagcacaaattgttcggcctgactatcgacccggaacgtctggcggcgattcgcgaggaacgtcgggagaacagtcgctatgcctcgcttcgtcagtgcaggatggaagtcgcggaagtggaagcgttgtaccgtaaaaatcagatcccgtggattaacagtaccaattattcggtagaagagattgccaccaagatcctcgatatcatgggccttagccgccgaatgtactagagaactagtgcattaacttgtttttttgttatcatgctaaccacccggcgaggtgtgacacacctcgcacttgaaatcagctgcgattggtttatcgtgatgcgcatcacttcccggtagtcctgccgtagaagcaacaaatttctgagacttgtaatgaacagaactgacgaactccgtactgcgcgtattgagagcctggtaacgcccgccgaactcgcgctacggtatcccgtaacgcctggcgtcgccacccatgtcaccgactcccgccgtagaattgaaaaaatactgaatggtgaagataagcgactgttggtcattattggcccctgctcgatccacgatctcaccgctgcgatggagtacgccacccgtctgcagtcgctgcgcaaccagtaccagtcacggctggaaatcgtaatgcgcacctattttgaaaaaccacgaacggttgtcggctggaaaggactcatctccgatccagatttaaacggtagctatcgggtaaatcacggtctggagctggcgcgcaaattacttttacaggtaaatgagctgggcgtccctaccgcgactgagttcctcgatatggtgaccggtcagtttattgctgatttaatcagttggggtgcgattggcgcacgtactaccgaaagtcagatccaccgcgaaatggcttcggcactctcctgtccggtgggttttaaaaatggtaccgatggcaacacgcggattgccgtggatgctatccgcgcagcccgcgccagccatatgttcctctcgccagacaaaaatggtcagatgaccatctatcagaccagcggcaacccgtatggccacattattatgcgtggtggcaaaaaaccgaattatcatgccgatgatatcgccgcagcctgcgatacgctgcacgagtttgatttacctgaacatctggtggtggatttcagccacggtaactgccagaagcagcaccgtcgccagttagaagtttgtgaggatatttgtcagcaaatccgcaatggctctacggcgattgctggaattatggcggaaagtttcctgcgcgaaggaacgcaaaaaatcgtcggcggtcagccgctcacttacggtcaatccattaccgacccgtgtctgggctgggaagataccgaacgcctggtcgaaaaactcgcctctgcggtagatactcgcttctgaatgcgtgcccattcctgacgggatgggcatttctgcgcaacttgttgtcttctcaacaaattactacttgctctggcccgccataatattgataataagaatcattgttatataaattattattaatttttatgcgttatacggatagcagaaaactcacgcctgaaacggatgccagtcacaagaccgcttccccgcagcccatccggcgaattaccagccagacactgttaggtccggatggcaaactgattatcgatcatgacgggcaagaatatctgctccgtaaaactcaggctggcaagctgctgttgaccaagtagcctttaactcgagcagctgacttccagccgtttaccccagtcgggtggacgactgacatagtcatcatctctgtcgctgaaaggatttcgcaacgcctcatgcaggcggtgcaattccgtcatatcatccttttctgccgcttcaatcgcccgttgcgccaaccagttgcgcaacaccagagccgggttaacgctttgcatcagttgctgacgctcactatcggtaatctcgtcttgttgcaaacgcccccgataacgggcaaaccagtcatcaaatgccgcacgatcaataaactcatcacgtagcggtgacgccgcgctgtgctgctcggtcagactcagcatgcggaatgtgcgggtataatcgctgcgctctcgcgccatcagactgaataattcattaagtagcgcgttatcctctttttgctccgtcatgaagcccagtttctgccgcatccgttgtccataatgcgtcaacaaaacctgctgatagctgtccagggcctcattcagcgcatcaacggcaacaaatggtgacaatgtctgcgccagacgctgtaaattccacaacgcgacggcaggttgattatcaaagctgtaacgcccttgatgatccgagtgattacaaataaaaccgggttcgtaatcatcaagaaaaccaaacggcccgtaatcaagcgtcagccccagcagcgacatgttgtcggtattcatcaccccatgagcaaagccgaccgtctgccattgggcaattaacgaggcggtacgtgcgacaacatcggtaaaccagagacggtatttgtcctcctcatcatcaagatgtgaccagtaatgacgaatggcaaagtcagctaactgacgaaccttttccggctcgcggcgatagtaaaaatgttcgaaatgaccaaagcgcagatgacttggtgccacacgcatcagcatcgcgcctgactccaccgtttcccgatacactggcgaatcgctggtgacgatacttaaagcgcgggtcgtcggaatgcccagataatgcatcgcctcactggcgagactttctcgtatcgtcgaacgtaaaaccgcccgtccatcccccattcgcgaataaggcgtcaggccagcacctttcagatgccagtccattgtagtgccatcagcaagcagttgttcgccgagtaaaatgccgcgcccatcacccagttggcccgcccagacgccaaactgatgaccactgtaaacctgcgcaagtggtgacatacccggcagtaggttttcgccgccccagacacctgcgccatttttaaacagcgacgatggaatactcagcgtgttagccagttcggtattatgccaaatcagccgggcattatttaaaggcgtaggggaaagtgctgtataggtttctggcaattcatcgcgccagcgggtaataaaagacagggtcatagatcctcctgtttgatagtgtagacggttactctcgtcttaaacaccagcaaacaggagggttatcgctgaaccaacgtcgttatctgatttataggaaccgcaggccacaggcatccctggagagcatggaaatcaaaggggataatctgtgccaatatttctggcgtatcaatgccccccgcgatgatgcaattgcaacaaggggaaatttgcgcctggatcgcacgaataaacggttcgaaggagcgatgcgtgatttgttgctgaataaaacttttatccagcatgacgcgggtgaaaagaccatcaaacaccgctttcattgtgctattacctgctcccaaattacctaacacaaggggatacatttgcgataaggataaaagatcgcgattatcttttccttcattgaaatgcgggtaattctcattaatcaacagttcaataaacggatattttaatagttcgcctgcgaaattatccctgtctaataataatgtagccacttgtggcgttaaattaagccaggcaaagagtttatgttgaataaaaaagtgttggcatgattttagtaattccaactgttcagaaaataattgccaatgttgctccacggtaagttgcgctataacccgactcgtcgggatacgaaccgtaccatcttcactggagaaatgggtaattaactcaacgccgacaaggtcttgctggttatctcttatcggcaggaaatagcaatcagaatgataaagattctccaaaaaaatcttcatggtaaccttccctctcgaaggatgtttttcagtatccggctaaaagggatgaggccataagacataacaattacagaaggagtaactttcatttgttccatgttaaccactttttcaggggtcctttttttagattatcctgattataaacgaataatccatttacggaatttttgtctgcaaaatactactgtattcaggagtaaatggacggcgatgtatcatcgccgtccatttttcgacatactagattcgtctcgcctgccagaaatttttctgccaatagacattatcaagtgaggaacgcatcactcccttgctggtagaggcgtggataaattggttgttggtatcgtaaatacctacatgcaaaccattttgtccggaacccgttttgaaaaagaccaggtcacctggcagcaactcgtctttatcaatttgcgtgccaatagaggcttgttgcttggtttcacggggcagctgcaaatcgaaacgatcgcgcatcgtcacaaccacaaatcccgaacagtccacaccgcgccgcgtcatgccaccataacgatacggcgtgccatgccagctttgtagctggtcgttcaaaccggcaataacggtaatcgaatcagaaagtctggcatttggcggcggtgctttatggtggctacacccggccagaaacagtgctgtgatcaaaataaggcagaaacgcattccgtacggttcctctgttttttattcttgcattaatttagcgtcgtaattacccgattttcaagatactaatgaaatcagatggtcgaaatcagcattctgtgaccttcgatatccagacggcgaaaattcatcccataggcctgcgccagatttgccggcgtgagcacctcttctctgcgtccactggccagcatttttccaccttttagcaaccacgcccgatgcgcatgacgcaatgtgtggttgagatcgtgactgctcatcacaatcgccagtccttgctgacacagcgcgctcagaattttgtctaaggcgctttgttgcgcaacatcaagactgttcatcggctcatcaagaagcagcaattggcctgcgggattggcttgtggtgtgatttgcagcaccaccgcagcaagacgtacgcgttgccattcaccgccggaaagttgattggtgctacgtccgagtttgtcatcaagagccagcgcccctgcgacatcattcagtagttcggtacgcgttttatcgtgctgatgcagtgtcaggtagtgccagaccggcattgcaaacggcggcgtctgctgttgtgaaagataggcgcgatgcagcgcgagctttgttgcagaccatgcttccagtggttgccccgcgaactgaatgcttcccttaccgctggtcattccggccattcgcgccagtaaggtactcttacccgcgccattcggccccaccaggtgcaggatctccccagcccgaacctcgccagaaagcggccccaggcgggtggattccgcaacatcctgtaactgcatcacaatagacattattttgccaacgccagtttaatgctttccatcacaatgggatcttccggcgtcatatccggggaaaaacgctggatgacctttccgtccctgccaactaaaaatttctcaaaattccataaaatatcatcagggtacagcggtgcacgacctttgctgaccatacgggcatagaatccgctctcttccggcgcgactgcagtcggcgctgcggcaatcaatttttgatacagcggatggcgtccttcgccattaacttcaatcttactgaacatcgggaacgtcaccccccatgtggtggtgcagtaagttttaatctcttcatcgctacccggttcttgctccagaaactggttacacgggaatcccagcaccacaaaaccacgatcagcccaggctttctgaatattctccaactgctcatattgcggcgttaagccacactttgaggcgacattgacaatcaacagcacattaccggcgtacttctccagcgtggtcacttcaccgtcgatatctttcactacggtcgtcagaatggaatcttgcatcgtttctcctgggtgtggtcagtaaaaatcttagcttttaatcatagaccgtcttttgcggctaacgtcctgcttttaacaataaccagataaacaccggcgcacccaacgttgcggtgaccacgccaattggcagctctgcggcagctaatgccaggcgcgctacaatatcggccagcagcaatgcgctcgcccctgccagcgcgcagccgggaagtaatacgcgatgatcggttaaaccacacagccggagaatatgtgggatcaccagaccaataaagccgatagcacccgccagcgccacactgacgccaaccatccagccggtcgctgccaccagcacattgcgccagaaccacaggggtaaacccagttgccgcgccgagatctcgccaagtgctaacatattcatcggcctggactgacaacagatccacaacaatacggggatcaatgccaccatcagccagctttgccgccagtctacgccgccaaaaccgcccatcatccagtacatcagctgacgtaaatcaacagaggtggaaaagtagatagcccacgtcattagtgcgctacagataatccctaatgcaacgccagccagcaataaccgactggtcgaaagatgacgacgagcgaaacgtaagagtattaaagtgatgataagcgcgccagcaatcgcacacagccctagcgcccagttggggagttgcccttgcccaagtaataccgcggcgataagccccacgcctgcgccgttagagacgccaagtagtccaggttctgccagaggattttcaaacaacgcctgcattacagcgccggatatagccagcgccgcaccaaccagcaatacagccagcgtacgtggcaggcgaatttgccagacgaatagttcgccacgaggagaaaaccagtcacctggcaaaatccattgttcaccggcgcaaaggcttaagagaagcgccagcagcatcaaaactgacaggcataataaccagcgaatattttgtcgctgttgttggcgggcaagtgtcagcatggtatccgttctgctgaagtgtcatggcgttgattttacggtgactcttcgacagtgaaaagaaaaaaggccgcagagcggcctttttagttagatcagattactcgtctttgggcgaagcgttttcgacccggctttttaacttctgcccgggtctgaaggtcaccacgcgccgtgctgtaatgggaatatcctcgcccgttttcgggttacgtcccgggcgttgattcttatcacgcagatcgaagttaccaaaaccagagagtttcacctgttcgccgttttccagagcgcgacggatctcttcgaaaaacagttcaaccagttctttggcatcccgcttgctaagcccaagcttatcaaacagatattctgacatttcagcttttgtaagcgccataggttcaatccctcaatgatgcctggaatcgctcttttaatgcctctacacatttggcgacggtagcggcaatctcctcttcttcgagtgtacggctggtatcttgcaggatcaggcttatggcgaggctcttatacccctccgcaacacccttaccgcggtacacgtcaaataagtttacgccaactacctgatttacgccaactttcttacattcggataaaatatccgctgcgggaacgttttctgcgaccaccaccgcgatgtcacgacggttcgccgggaagcgagaaatctcgcgcgcctgaggcaccacgcggtctgcgagcttgttccactccagttcgaacaccagagtgcgaccgttaagatccagtttacgttccagttcaggatgaacaaccccaacaaaaccaatacgttcacctttcagataaatcgctgcggattgccccggatgcagtgccggattcgcttctgcacggaactcaacctcattcagtttaccggtcaggtcgagaacggattcaagatcgcctttcaaatcatagaaatcaacggtctcttttgccaggttccagtgctcttcgtaacggttaccgcaaatcacaccggctaacatcagatcctgacgaatacccaacggtgcctgagtatctggcacgaaacgcagaccgctttcgaaaatgcgtacacgattctgctgacggttctggttgtacaccacggttgccagcaggccggtccacagagaaagacgcattgctgacatttcaacagagatcgggcttggcagcagtaaggcttcaacgcctggatggatcatctgctgcactttcggatcaacgaagctgtaggtgatcacttcctgatagcctttgtcgttgagcagcgtttttacgcgcttgagcgacaggtcagcttcacggtgagtccccataatcaggcttgcctgtaccggctcatccgggatgttgttgtagccgtaaacacgcgcgacttcttcgaccagatcttcttcaatctccatgtcgaaacgccagctcggcgcaactgcctgccactcgtctttgccttcggtcacttcgcagccgagacgacgcagaatgtctgttacctgctcatcagcaatatgatggccgatcaggcgatccagtttgctacgacgtaaagtgatggttgcacgcttcggcagcgttgcttcgttagtgatatcaattaccggacccgcttcaccaccgcagatgtcgatcagcagacgggtcgcacgttccatcgctttgtgctgcagtgccggatcaacgccacgctcataacggtgagacgcatcagtatgcaggccatgacgacgagcacgaccggtgatagacagcgggctgaagaaagcgcattccagcaggacgttttgcgtttcgtcattcacgccagagtgttcgccaccaaagatgccgcccatcgccagcgccttgttgtggtcggcgatgaccagggtgtcagcattcagcttcgcttcagtaccatcgagcaataccagcgtttcaccctcttttgccatccgcaccacaatgccgccttcaatgcgatctttatcgaaagcgtgcatcggctggcccagttcgagcagcacatagttggtgacgtcaacaactgcatcgatagaacggatcccgcaacgacgcagtttttctttcatccacagtggagttggcgctttaacgttaatgccttttaccacacggccaagatagcgcgggcaggcatccggcgcttctactgcaatcggcagcgtgtcgtcgatggtcgcaccaaccggaacgatttccggttcaaccagcggcagctggttcaacacggcaacgtcgcgcgcaacaccaatgatacctaagcagtcggcacggtttggcgtcacgctaatttcgatggtgttgtcatcgagtttcaggtattcgcctgatgtcggtgccaatcggcgcatccgcaggcagctcgataatgccgttatgatcgtcagaaattcccagctcagagaaggagcacagcatcccttcagacggttcgccacgcagtttcgcggctttaattttgaaatcacccggcagaacagcaccaatggtcgctaccgccacacgcaggccctgacggcagtttggcgcaccgcagacgatgtccagcaggcgatcgccgccgacattcacttttgtcacacgcagtttgtcagcgttcggatgctgtgcacactcaaccacttcaccaacgaccacgccgtggaagctaccggcaaccggttctacaccatcaacttccaggcccgccatcgtgatttgatttgccagcgcgtcgctatcaatcgccgggttcacccattcgcgtaaccacagttcactgaatttcataatctattcctgccttatttaaactgtttgaggaaacgcagatcgttttcgaagaatgaacgcaggtcggtgacgccgtaacgcaacatggtcagacgctccatccccatcccgaaggcgaaaccagagtaaacttccgggtcgatgccaacgttacgcagcacgttcggatgcaccatcccgcagcccagtacttccagccatttaccgtttttccccatgacgtccacttctgcagaaggttcggtaaacgggaagtaggaaggacggaagcggatctgcaaatcttcctcaaagaagttacgcaggaagtcgtgcagcgtgcctttcaggttggtaaagctgatgttggtatcaacaatcagaccttccatctgatggaacatcggcgtgtgagtctggtcgtagtcgttacgataaacgcggccaggcgcgatgatacgaatcggtggctgctgggctttcatggtgcggatctgtacgccagaggtctgggtacgcagcaggcgggtagcgtcaaaccagaaagtgtcgtggtcagcgcgcgccgggtggtgaccaggaatgttcagagcatcgaagttatgataatcgtcttcgatttccggcccggttgccacggtaaagccaagctcaccgaagaaactttcgatacggtcgatggtacgggtcaccggatgcagcccgccgttttcaatgcgacgacccggcagggagacatcaatcgtttccgccgccagacgcgcattcagtgcagcgctttccagttccgctttacgcgcattcagcgcctgctgaacctgctctttcgcttcgttgataaccgcaccagctgccggacgctcttctggcggcagctcacgcagggtcgtcatctgaagggttaagtgcccttttttacccaaatattcgacgcgcacattatctaacgcggcaacatctgacgcctggctaatggccgccttcgcactggcaaccagttctgcgagatgtgacatgtttttcctcattgtgtcagtggtgacactggttcgttggacttagagcccatcccatcaggctattttacttgccattttggtcccgggcagtgctcgaaatcctcacgtacttaagtacgctccggtttctccgcgctggccgtgtccagactggctgcgacaattacgcctgatgagacaggctttttatttttcaaaacgcgcatacaaaaaaagcctccactgggaggctttcaggcgctgttttccgtttctcttctcacgcgctagcctcctggagtcaggtgctaaagtaaaaaaagaagcggaaaatagcagcattcattgcttgcgttaccttttggtactcttcaaaagacctttattgaaaaggctacggcgataaaagtcaatgttttgatggcgttgaaacgaaaagagggagactagctccctctttcaactggcttatgccagagctgctttcgctttttcaaccagagcggtgaacgctactttgtcgaatactgcgatatcagccaggatcttacggtcgatttcaacagaggcttttttcaggccattgatgaatttgctgtaagaaataccgttctgacgtgctgctgcgttgatacgcgcaatccacagttgacggaactgacgcttacgttgacgacggtcgcggtaagcatactgaccagctttgataacagcctggaaggcaacgcggtatacgcgagaacgcgcaccgtagtagcctttagcttgtttcaaaattttcttgtgacgtgcgcgtgcaataacaccacgttttacgcgagccatatgtgctctcctgtatctatattctaattaaaaagttaaaaacgttaacggcttatgcgtacggcaggcacgcgattaccaggcccagatcgcctttggaaaccatggctttcggacgcaggtgacgtttacgtttggtcgcttttttggtcagaatgtgacgcaggttagcgtgcttgtgcttaaaaccacctttaccggtttttttgaagcgcttagcagcaccgcgtacggtcttaatttttggcattttaataacttccacttcgcattgttaataaacgaaacaaaggcgaacaatgcctgtgaagcccaaaggctccacagacagtgctacttgaaggccttactgtttcttcttaggagcgagcaccatgatcatctggcggccttcgatcttcgttgggaaggattcgaccactgccagttcttgcaaatcgtctttcacgcgattaagcacttccataccgatttgctggtgcgccatctcacgaccgcggaaacgcagcgtgattttggctttatcaccctcttcgagaaagcgaatcaggctgcggagttttacctgatagtcgccttcatctgtaccaggacggaatttaatttccttaacctggataactttttgctttttcttctgttccttagaagacttgctcttttcatagaggaatttgccgtaatccattatacgacaaaccggcggctcggcgttagggctgatctcgactaagtctactccggcttcttctgctttctccagagcttctctcagactcacaataccaagctgctcgccttccagacctgttaagcgaacttcctgggcgcgaatttcgccattgatacggttagggcgcgccgtttgaactcgttttccgcctttaataccttattcctccaattgtttaagactgcggctgcgaatctcttgttgcagcttctcgatcacttcatttacgtccatgcttcccaggtctttaccacggcgggtgcgaacggcaactttgcctgattccacctctttatcaccacagaccagcatatatgggacgcgacgcaaagtgtgctcgcggattttaaagccaatcttctcatttctcaagtctgctttaacacgaatgcccgcatttgatagtttttgcgtcagttcgttaacgtattcagactgagaatcggtaatattcatgataacaacctgaactggcgcaagccaggtcgggaagaaaccagcaaattcttcggtcaggataccgatgaaacgttccatcgaccccagaattgcgcggtgaatcattaccggtactttacgttcattgtcttcgcctacataagaagcgctcagacgagaaggcaaagagaagtccagctgtactgtaccgcactgccatgcacgatcgaggcagtcatacagggtaaattcaattttcggaccgtagaaagcgccttcacccagttgatattcaaacgggatgttgttttcttccagcgcaaccgccaggtccgcctcagcacgatcccacatttcgtcgctgccaatacgtttttcaggacgagtggagagtttgacgacgatcttctcgaagccaaaagtgctgtacatatcatagactaaacggatacatccgttaacttcatcgcgaatttgttcttcagtacagaagatatgcgcgtcatcctgggtaaaaccacgcacgcgcatcaggccatgcagcgaacctgacggctcgttacggtggcagctaccaaactcggccatacgcagcggcagatcgcgataagacttcagcccctggttgaaaatttgtacgtgccccgggcagttcatcggcttaatgcagtattcacggttctcagaagacgtggtgaacattgcatctttgtagttgtcccagtgaccggttttttcccacaggacacggtccatcatgaacggacctttaacttcctgatactggtactctttcagtttagaacgaacaaacacttccagttcacggaagatggtccagccgtcgttgtgccagaataccatacccggcgcttcttcctgcatatggtacaggtcgagctgtttaccgattttacggtggtcgcgtttcgcggcttcttccaggcgttgcaggtaagcgttaagcgcttttttgtctgcccacgccgtaccgtaaatacgttgcaacattttgttattgctgtcgccacgccagtaagcccctgccgttttcattagtttgaaatgatggcagaaacgcatgttcggtacgtgcggaccgcggcacatatcgacatattcttcatggaagtacagacctggcttgtcatcatgggcgatgttttcgtcaagaatggagactttgtagctctccccacggttggcgaaagtttcacgcgcttcatgccagctgactttcttcttaatgacgtcgtagtttttctcagcaagctcatgcatccgcttctcgagtgcttcgacatcttcctgggttaacgtgcggtcaagatcaacgtcgtaataaaaaccgttgtcaataaccgggccgattgccattttggtatgcggccaaagttgtttaatcgcgtgccctaacaggtgcgcacaggagtgacgaatgatctccagaccttcttcgtctttggcagtaatgatcgacagttgtgcgtcgttttcaatcagatcgcaagcatcaaccagttcgccattaacgcgccctgcgatacaggctttcgccagacctggaccaatgtccagcgcaacatccatggggcttacagcgtggtcgtaatggcgttggctgccatcaggaagagttataacaggcattttatatccttatttgcagtggtgacccacacgaaagatcacatacaaagaaaaatttgtttattaacagttcattgcgaaaccatctagccaacaaatgctaaattggtccgcaatcaggtacacaaatgaaagacattaacctctcaccttccacccggttgaacgatgttaacactaaaaaaagggagattgtacctttccgtttcacattgattcgattcgcaattcgtttgtagtgagtacaccagcaaaacgcttaaagaaccactgataacatcacagagtgtctgaaaggtttactacgagcggatttacagcagcataaactgaatccagcaaagttcgttgcgtgatttggcggtagtatttaaacgatcatgagattaatgacgaagtagtcatatcgcaatgataaaagtgacacaattcttatagcaatttttcgtgcgcatttcgttctggcgataataatcaatcatcatcctcaaaatctccagacatatataaggcgaatagattatgagtaaaaacgatatcattatcagaactcattatgagtctcctcttagaatgcacatcgatagcgacatactaacgccttcatcagagcctattaatcaatttgcgcgccagctcatcaccctacttgatacctcttatttaagttcgatgctgtcatactgtgttactcaggaatttaccgcaagctgtcgaaaaaatatcacacaattgttataccactgccctttttatcattaactttgccacttcacccatccatgcagaaaatacactcattacattacactataaaaaagaaatcatttccttattcctggaaaccacgccgattaaagctaaccatttgcgaagcatactggattatattgaacaggaacagttaactgccgaaaaacgtaaccattgcatgaaactgtccaaaaaaattcatagagaaaaaaccatacagccaacagtaaatctcaatgatagtgcatttttttgcaatctccttctgacactattttttgtcgccatctgtcattaaaatacgcccttgattcattgagaaatggaaaaggcaaagtcaacctgattaaacattactcctctgttgaatccatacagcagcatgtttccttagtccgggacgcggaattcagagcattacttcgccatcctcttgcaaggagtcgcgttatcgcgagtcaggattttggctttgctttagatattttcttctgtcgaatgatggcaaacaatgtcagtcatatgtccgcgattttatatatagacaatcatactttgtcagtaagtaaagatgtcgtgttatcttatatatcaacgttgggtacttttgaaaaaatattcttttagccaacgtcagttatttacactgttggccgctaaaaatcatgacaacatgtcagctgttcatatagccattcatcataatcatcataaaactgtagaaacatattatgctgctataaatgtaatcagccaaagcctgagttttagtgctgatgaactaaagacgtatttataacccgctatttatgatatttgtatatcgatacataatttttttcataaaatgcagaaacagtgaccaggtgtacaacgccacccgacgactgtaataacaaaaaatcccttgatgcctgtcccttttgttacactccgttatcacgcacaagagatatgcaggacactggtatgccgactaaacgctttgataaaaaacactggaagatggtggtggtgctactggcaatctgtggcgctatgttgttggtacgttgggcagcaatgatttggggctgagcagtgacaaacgaaaacagccagaccgcataacacggtccggcagataattttacatgctgtaacccaacgataaggttgtccgacgatcggtatgttccggtgcagactctggaggttcagagttccatgtaacgttgtaagccaccttcagtccaaaatgttcattaatagcaacatttaatgcgctttcggagttcagcgttgtgtcttccgcgccaaagaccgaaacaccctgcgtaaatttagcgttgtcagtcaactgccatgcataagccccggaggcatagcccagcggctgggtttcactggcattgtcggtatatttgtcgtaacgcacaccagggccgaattcaaagcggaaactgtgtaccgggccattcaaaaactggcgaccataacccgcggtcaacacatcgcgctctcgatagccgttataacggtctgtcagccagcttgcctgaccaaataaatagtcataatcagttaaattaaaacggctacgcccgcccgccgcatatttttctgaagaacgctcatcattagaagaagtattactggcgttcccccacagcgaccaggcagtggtttgtccataccaggtcatagtggtgtcagccgtaagtgaggagcttttcgtattgcctgattgtgcaagatatcctgcgttcagattaccttcgaaaggttttttagcgctggcaggatcgtccatgacagtaaaaacggaatcatcggcagctgcattcagtgacgcaaacatgccccccgccaacataacgatggcaggaactgtcttcaaaagcttcatttatcaagagtccgtacaacaaaaaaagagaccatcgcggtcccggaaactttcttaaggatcaaagattagcgtccctggaaaggtaacgaattataaaaaggcgcgaataacttagcaatgtattcttatttcattttttgaataagcatgtggcgaaaacagatttttatttatatatatttatctgcaaaattttaaataaagctccaataaatcatattgttaatttcttcactttccgctgattcggtgccagactgaaatcagcctataggaggaaatgatggtacgtatctatacgttgacacttgcgccctctcttgatagcgcaacaattaccccgcaaatttatcccgaaggaaaactgcgctgtaccgcaccggtgttcgaacccggtggcggcggcatcaacgtcgcccgcgccattgcccatcttggaggcactgccacagcgatcttcccggcgggtggcgcgaccggcgaacatctggtttcactgttggcgcatgaaaatgtccccgtcgctactgtagaagccaaagactggacccggcagaatttacacgtacatgtggaagcaagcggtgagcagtatcgttttgttatgccaggcgcggcattaaatgaagatgagtttcgccagctcgaagagcaagttctggaaattgaatccggggccatcctggtcataagcggaagcctgccgccaggtgtgaagctggaaaaattaacccaactgatttccgctgcgcaaaaacaagggatccgctgcatcgtcgacagttctggcgaagcgttaagtgcagcactggcgattggtaacatcgagttggttaagcctaaccaaaaagaactcagtgcgctggtaaatcgcgaactcacccagccagacgatgtccgcaaagccgcgcaggaaatcgttaatagcggcaaggccaaacgggttgtcgtttccctgggtccacaaggggcgctgggcgttgatagtgaaaactgcattcaggtggtgccaccaccggtgaaaagccagagtaccgttggcgctggtgacagcatggtcggcgcgatgacacttaaactggcagaaaatgcctctcttgaagagatggtccgttttggcgtagctgcggggagtgcagccacactcaaccagggaacacgcctgtgctcccatgacgatacgcaaaaaatttacgcgtacctttcccgctaacaaaaacattcccccagcattgggggaatcaccaccaacctgtcggcaacgcgtttctccgactatgctcaaaagtcatgtgataacaaaggggtgaactatggccagtggcgatcttgtccgttatgtaataaccgtcatgttgcatgaggatacattgactgaaattaacgagttgaataattacctgactcgcgacggttttttgctcaccatgacggatgatgatggcaatatccatgagctggggactaacacttttggacttatcagtacccaaagtgaagaagaaattagagaactggtttcggggcttacccacagtgcaaccggcaaagatcctgaaatcaccatcacgacctgggaggaatggaatagcaacagaaaataaatggtttttgggcaataatcagtctgtggtgtgcgttagctcgtgtttttacaccgcattcttgcgctaaccttatgatctggcagacaacatgggagagacatcatgtggcaggcaatcagtcgtcttttgagcgagcagttaggtgaaggcgaaatcgaactgcgtaatgaactgcctggcggagaagtccatgccgcatggcatttgcgctatgcaggacgtgactttttcgtcaaatgtgatgaaagggaactgcttcccggttttaccgccgaagccgaccaactggagttactgtcgcgtagtaaaaccgtcaccgtgcctaaggtttgggcagttggcgctgaccgtgactacagttttctggtgatggattatctcccacctcgcccgctggatgcgcatagtgcatttattcttggtcagcaaattgcgcgtttacatcaatggagcgaccaaccacaatttggcctcgatttcgataacgcgctctccacaactccacagcccaacacctggcaacgtcgctggtcaactttttttgctgaacaacggattggctggcagctggaactggcggcagaaaaagggatcgctttcggcaatatcgatgccatcgtcgagcatattcagcagcgtctcgcctcgcatcaaccgcagccttctctgttgcacggcgatttatggtccggcaactgtgcgctgggtccggatggcccgtacattttcgacccggcctgttactggggtgaccgagagtgcgacctggcgatgttaccgctgcatactgaacagccgccacaaatctatgacggctatcagtcagtatccccgctacctgccgatttccttgaacgtcaaccggtttaccaactctacacgctgttaaatcgtgcaaggttatttggcggtcagcatttggttattgctcagcagtcactggatagattattagcagcatgatatgggttgaggataatggccgctccgtgcggccttttgattaaataaacccaagcagagaaaagaacacataacctgcagcaatacaaataagcggcaggatatacagcgagaaaaactgcaggaaaatagtatggtgcggaacaacaatacgtgactcaatttgttcacgcgttagcccctcttcccctttggctttttccagaatgagttgatcttcaacaccttcccgcaagaagcgcgcctggcgactcatccgggctccggaatcctgcaacgccagtccgacaaaaatcaggatgaaaatcacccagaacataacgttcacgccaccattaaaatttggcgtcggagagttgtaccagaacagattcaaaaaaggcgtattcgcctgcatcatatcgatcatgacatgagtaaagtcgagcatgaccgcattaatgccttcctggttttcctgccgggtattcataaatttcagcaaagaaatcaatgtagagatcaatgcaggtataaaaatcacccaacccaaaatccttttcaaaacagcaatgcgtccagcttgttgatacgtcatgagttctccttgattaagacgcgtcgtttcacttagtttacctgtagatatctgttttcgcccattctttaaaggcgatatgataggcgcttaatcataagcacggcttaataccttacatataatgctctaaaggagaggttgtaatgtcaaccccgcgtcagattcttgctgcaatttttgatatggatggattacttatcgactcagaacctttatgggatcgagccgaactggatgtgatggcaagcctgggggtggatatctcccgtcgtaacgagctgccggacaccttaggtttacgcatcgatatggtggtcgatctttggtacgcccggcaaccctggaatgggccaagccgtcaggaagtagtagaacaagttattgcccgtgctatttcactggttgaagagacacgtccattattgccaggtgtgcgtgaagccgttgcgttatgcaaagaacaaggtttattggtggggctggcctccgcgtcaccgctgcatatgctggaaaaagtattgaccatgtttgatttacgcgacagtttcgatgccctcgcctcggctgaaaaattgccttacagcaagccgcatccgcaagtatatctcgactgcgcagcaaaactgggggttgaccctctgacctgcgtggcactggaagattcggtaaatggcatgatcgcctctaaagcagcccgcatgcgttccatcgtcgttcctgcgccagaagcgcaaaatgatccacgttttgtattagcaaacgtcaaactctcatcgctgacagaactcaccgcaaaagaccttctcggttaatgaccagggggcagtgatcacactgcccctggttctttatctgaatttgcattcaactgacggattaatcgccaatttaagagaaagagttacaccgtcaccacttccgtgcactgtataaaaaccctatactgtacgtatcgacagtttagtgagttttatcatgacggcggaaggtcaccttctcttttctattgcttgtgcggtatttgccaaaaatgccgagctgacgcccgtgctggcacagggtgactggtggcatattgtcccttccgcaatcctgacgtgtttgttaccggacatcgatcacccaaagtcgtttcttgggcaacgattaaagtggatatcaaaaccgatcgcccgcgcttttgggcatcgtggttttacccacagtctgctggcggtatttgcgctgctggcaaccttttaccttaaagttcctgaaagctggttcattccggctgatgcgttgcagggtatggtgctgggttatttgagccacatacttgccgatatgctgacacccgccggtgttcccctgctctggccatgccgctggcgtttccgcttgcctatcctggtttcccaaaagggcaaccaactggaacgttttatctgcatggcattatttgtctggtcggtatggatgccccattcattacccgaaaacagcgctgttcgttggtcatcgcaaatgatcaataccttacagatccagtttcatcggcttattaagcatcaggttgaatactaaaaaggcaaaaatcgcctttctggaataagcaattccatttgaatataagagccagctcacagttctgttaatcttgcgccaacactatgactgttacgcagtgatagaaataataagatcaggagaacggggatgaactttccattaattgcgaacatcgtggtgttcgttgtactgctgtttgcgctggctcaaacccgccacaaacagtggagtctggcgaaaaaagtgctggtgggtcttgtgatgggtgtggtttttggccttgccctgcataccatttatggttctgacagccaggtacttaaagattctgtacagtggtttaacattgttggtaacggctatgttcaactgctgcaaatgatcgttatgccgctagtcttcgcctctattctgagcgcggttgcccgtctgcataacgcatctcagttaggcaaaatcagttttctgaccatcggtacgcttttgtttaccacgctgattgcagcgctggtcggtgtgctggtcaccaacctgtttggtttgacggctgaaggtctggttcagggtggtgcagaaactgcacgtctgaacgccatcgaaagtaactatgttggtaaagtctctgacctgagcgttccgcagctggtcttgtcctttatcccgaaaaacccgtttgccgatctgaccggagccaatccgacgtcaattatcagcgtggtaatttttgccgcattcctcggcgtagctgcgctgaaactgctgaaggatgatgcgccgaaaggtgaacgcgtcttaaccgctatcgataccctgcaaagctgggtgatgaaactggttcgcctggtcatgcagttgaccccttacggtgttctggcgctgatgaccaaagtggttgcaggttctaacctgcaagacatcatcaaactgggaagtttcgttgttgcgtcctacctcggtctgctgattatgtttgcagtgcatggccttctgctgggcattaatggcgtgagcccgctgaagtacttccgtaaggtatggccagtactgacgtttgcctttaccagccgttccagtgctgcgtctatcccactgaatgtggaagcacaaacgcgtcgtctgggtgttcctgaatccatcgccagtttcgccgcctctttcggtgcgaccattggtcagaacggttgtgccggtttgtatccggcaatgctggcggtgatggttgcgcctacggtgggcattaacccactggacccgatgtggattgcgacgctggtcggtattgtcaccgttagttccgcaggcgttgccggtgtcggtggtggtgcaactttcgccgcactgattgtgctgcctgcgatgggcctgccggtaacgctggtggcattgttaatctccgttgaaccgcttatcgacatgggtcgtacggcgctaaacgttagtggctcgatgaccgctggcacgctgaccagccagtggctgaagcaaaccgataaagccattctggatagcgaagacgacgccgaactggcacaccgttaatcctgatttgttacgttaaacgcctgtcatcccgacaggtgtttttttattcttcgacctcattttcctgacgaatctgatttgcccaacgctgggcggattcaggcacagtaaacgccggtgagcgcagaaatgactcccccatcagtacaaacgcaacatatttgccacgcagcatccagacatcacgaaacgaatccatctttatcgcatgttctggcggcgcgggttccgtgcgtgggacatagctaataatctggcggttttgctgacggagcggtttcttcattactggcttcactaaacgcatattaaaaatcagaaaaactgtagtttagccgatttagcccctgtacgtcccgctttgcgtgtatttcataacaccgtttccagaatagtttccgaagcgggatctggctggtggtctatagttagagggttttttgaccaaaacagcggccctttcagtaataatttaaggagacgagttcaatgtcgcaacataacgaaaagaacccacatcagcaccagtcaccactacacgattccagcgaagcgaaaccggggatggactcactggcacctgaagacggatctcatcgtccagcggctgaaccaacaccgcctggtgcacaacctaccgccccagggagcctgaaagcccctgatacgcgtaacgaaaaacttaattctctggaagacgtacgcaaaggcagtgaaaattatgcgctgaccactaatcagggcgtgcgcatcgccgacgatcaaaactcactgcgtgccggtagccgtggtccaactctgctggaagattttattctgcgcgagaaaatcactcactttgaccatgagcgcatcccggaacgtattgttcatgcacgcggatcagcagctcacggttatttccagccatataaaagcttaagcgatatcaccaaagcggatttcctctcagatacgaacaaaatcaccccagtatttgttaggttctctaccgttcagggcggcgctggctctgccgataccgtacgtgatatccgtggctttgccaccaagttctatactgaagagggtatttttgacctcgttggcaataacacgccaatcttctttatccaggatgcgcataaattccccgattttgttcatgcggtaaaaccagaaccgcactgggcaattccacaagggcaaagcgcccacgatactttctgggattatgtttctctgcaacctgaaactctgcacaacgtgatgtgggcaatgtcggatcgcggtatcccgcgcagttaccgcactatggaaggcttcggtattcataccttccgcctgattaatgccgaagggaaggcaacgttcgtacgtttccactggaaaccactggcaggtaaagcctcactcgtttgggatgaagcacaaaaactaaccggacgtgacccggacttccaccgccgcgagttgtgggaagcgattgaagcaggcgattttcctgaatacgaactgggcttccagttgattcctgaagaagacgaattcaagttcgacttcgatcttctcgatccaacaaaacttatcccggaagaattggtgcctgttcagcgtgtcggcaaaatggtgctcaatcgtaatccggataacttctttgctgaaaacgaacaggtggctttccatccagggcatattgtccccggtctggatttcaccaacgacccgttattgcaggggcgtttgttctcttataccgatacacaaatcagtcgtcttggtgggccgaatttccatgaaattccgattaaccgcccgacctgcccttaccataatttccagcgtgacggcatgcatcgtatggggatcgacactaaccctgcgaattacgaaccgaactcgatcaacgataactggccgcgcgaaacaccgccggggccgaaacgcggcggttttgaatcataccaggaacgcgtggaagggaataaagttcgcgagcgcagtccatcgtttggcgaatattattcccatccgcgtctgttctggctaagtcagacgccattcgagcagcaccatattgtcgatggtttcagttttgagttaagcaaagtagttcgtccgtatattcgtgagcgcgttgttgaccagctggcgcatattgatctcactctggcccaggcggtggcgaaaaatctcggtatcgaactgactgacgaccagttgaatatcaccccgcctccggacgtcaacggtctgaaaaaggatccatccttaagtctgtacgccattcctgacggtgatgtgaaaggtcgcgtggtagcaattttgcttaatgatgaagtgagatcggcagaccttctggccattctcaaggcactgaaggccaaaggcgttcatgccaaactgctctactcccgaatgggggaagtgactgcggatgacggtacggtgttgcctatagctgctacctttgccggtgcgccttcgctgacggtcgatgcagtcattgtcccttgcggcaatattgcggatatcgctaacaacggcgatgccaactactatctgatggaagcctacaaacaccttaaaccgattgcgctggcaggagacgcgcgcaagtttaaagcaacaatcaaggtcgctgaccagggtgaagaagggattgcggaagctgacagcgccgatggtagttttatggatgaactgttaacgctgatgacagcacaccgcgtgtggtcacgcattcctaagattgacaaaatcccggcgtaaatatggataaggtcacgccccctggggagtgaccttaccaccttacttacacatcatgataactacccaaccgataaccacgctcagcaatcgcatatttcaacgacgctgaagtcagcacatccagttccgttaaccgagggaagcaataagcactctggcgaatcgtattatcgacaaacgccggatggcacatgacttccaacgaacgttccccgcgatggctggaatcatcaagcacttgcaggaacaatgcctcgctaatctcttcaccataaaacgcgctactgaatccctgcgaactgcgcagattagccggtaaatcaccatcgttagatagcggttgacggtcgatgcgcaacgcaatcccctcttcagccgcaaactttgccacaatcgggaaaatctgcgggaacatatgcacatgatgatggctatcaagatgcgtaggtttgcgtccaaatagctcaatgaaacgcaaatactgactggcgagctcctgagtaatttcttccagcggtaaagcatcttcttctgccaactgccagatccattttcccagcacaccatcgcgggttaaccccggcatagctgtcagaggcttgcccatagtaaggacaaagtgcatccctatggccagactcggttcatcacggctcaactgcaccgcatggtcaatagcctgcccattcaccagcgccgtcgtcgacgtgacaatcccattgcgacaggcctcgataatgccgtagttctgacctttgcttaagccaaaatcatcggcattaacaatcagtaagcgttccataatcagcctcggttaatgtgcttttttaagctctgcgatgcagtcggcaaaatttggcagccatttctcgtgcgccagaatcatctcgcgtgccagcagctcagcatcgcgatcggaatgcaccaacggactaaggtttagcgccagtaagacatcgttaaattctccactaagtgcggcgttgctggcagcaatctcgaagcctttgatggtgtgaatcagccccatcactttatcatcgaaatgcgtaatgcgcggatgtggcgtcgcgccatcgcgccccagcgtacaggtcatttctaccgcccagtctgccggaatattatcaatatgcccatgatgcgggatattaacgtaatgttctgcttgcttgtcgttatagatagcgttgatcacttcgcacgcagcatcagaataataagccccaccgcgctgttccagttctttcggcttaacgttcaactccgggtttttatatagctcaaaaagttgtttctcgactttctgtactacctgcgctcgtgcgccgcctttgtagtattcgcccatttcaatagccagcatctctttttgcttgaagtaataaagcaaataagaacacggcaacagattcatagaacgaattaagccttcgctaaatggcagatcgaaaatatttttaacgccagatgcttttaactgcccggatgccacaccatcaagcaattcggcaaagcgtgatttgccatttaccagcacatccttaatgaacaccatatggttgaggccgaacagatcgatagataaatcatcgctgtctttcagcatcagaacatcgcgaataaacatcttcatgccgatcggaatattacacacgccgataaagcgtttaaatccggtatgacgataaacggcttcagtgaccattcccgccgggttagtgaagttaatcacccatgcattcggacatagttcttcgacatcttttacgatgtcaaaaatcaccggaatggtacgcagacctttaaacagaccgcccgcgccgttagtttcctgaccaagataaccatgacttaatggaatacgttcatccagttcccgcgccggtaattggccaacgcgcagttgggtagtaacgaaatcagcatctttcaatgcttcgcggcgatccagcgttttataaagcttcatcgggacgccagcgttatcaatcatccgttggcagagatcaaaaataatatccagtttcgctttaccaccttcgacatccaccagccataattcgctgaccggcaattcgtgataacgcttaataaatccttccagtaactccggggtatagctgctcccgccaccaatagtgacgacttttaatttctggctcataatttctcccttcagtacagaatactgatatctggcatatctgcccccggacataaataatccagcaacaggacagatatgtgaattgtcaggtataacgacttactgattaaattcagtcaatttcttacgatagctcttaggcgtaaaggatgttaatttcttaaacgttttaataaacaagctcgggctactataaccggcctcaaacgcaatatccgtcactgaatagttggtcatttccagttgttttttggcaaaattaatacggatttcattaataatctgcattggcgttttaccatagtatcgttgagtcgctcgcgtcaaatattcctgtgatttggctgacaacgtcaccatattctccagcgccgattcactaaactgctctttatcatgcatcttttctaccgtacttttcagccactgcggtatatcatcaatcacctgttcttcgcggtaatgacgtaaacggttaatgacataaaaagtaaccatctcaacaaactcttccagccctgtttcgcggaaattcaatgaagaaatcactgtttccacataggtgagaaaagcgttattggtccggtatacctgcgaagctacaaagcaataaggcaacaacggcaggtaatgctgctcaaaaaagcgtttactgatcccaacgttcaatatacgcgtggcaccaaattcataaaaactttgatggtgcgaacctaacggaataaaaacaaaatcgccccgttccagtaacacgcgcttaccgttaatctcctggaaataacgcccggttaataccagagtaaattcataatagtcgtgctgatgcagtccgctgatactctcagttttattgtagataaacacatggaagtttttgccattaaacaactgctgttctcgggcagtggcaatttccggcgcgttaatcactggctgcatcatcgactccttatgccttcagtttttcatgaagctcaattaattcagtaatcagttcacgcgcaagcatggacgtcattaaatgatcctgagcgtggaccagcaccagactcactttcatcttaccttcgccagcatcgccttcaatcagtttcgtctgtaccagatgcgcttcattcaatgccatccgtgactgatccatcatcgcttttgctgcggcaaaatcgccctgcttcgcctgtttcagtgccgcatacgccaggctacgcgcttgtccggagttgatgataagccccatcaccacttcttccagctcttcagcttccgtttgcgtatcgggaatattatcgagatccatcatacatcgttcctctctattcttaccggcacgattacccgtaccggcatcaattaaaatttcagggcgttggcgatatcttcttcgctctcttctttatcaatcgcgttttgtgctttgttagcgaccacaacaaagggcagataaattaacgttgcgataccaagattgaagagtgcgaccagcaatgcggcgacgctaccgttggtgttaaagaaggctcccagaccggttggcatggtccacggtgcaatattggtcaccggtggaataatgcccatgtagtacgctgccagggtgattgccgccagaatcggttgtaccagtacaaacgggataaacatcaccgggttcatgataattggcagaccaaacagaatcggttcgttaatctggaagatgccggacggcagcgccagttttgccacctgacgataatcagcacggcgagaagcgataaagatagccaggatcaggcctaaagtcgcaccactgccaccaaggaaaataaaggagtccagcatcggtttggcccagatatggaaggtcttaccggctgccagcgccgcttcgacggaaccatattgctgataggtcgcgatattttccagcgcccacggcgtcataatgccgttgtccagtgcggtcagcgccagcgcgccatgaataccgaagaaccagagcagtggaacaaagatcacataggcccagcctaccacgctacccaacgatgccagtggggttgagatggtatccataatgatctgatggaagtttgtgccccaggtattcaacgcccaggcaataatccccatcacggaaagaataataaaacctggaattaatgctgagaaagagcgcgaaaccgatgtcggaacgctatcaggtaacttaatgacccagttacgatgaacaataaaggtaaacatttctgccaccaccaggccaataataatcccggagatgatattcgccccacctaaccagtttgcgccaaccgcataggcctcaccgacactatatggggtgacggtcataaatgctgcaacggataacaacccggccgccagcgcatcgactttacgctcttctgccagcgccatgccaataaagaacggtgccattaaagacattatccctaatgttccgttatatacgttgccgccaatacctttcagaccattaagtgtttcaatggttgaggcatccaggcgaatacctaaggaataaaaaaacgacccctccccaaagcttagaaaaacgttgttaattaatacaaacatggcccccgcaagggttaacggcattaagcgaataaagccatttttgattgcattaacgtgtggctgctttcctattttaactgcaaaagggaggagtaccttttcaagcgatgcaataacattactcatagaaaaataccctttaaaaccgcaatttaaatattgcggtattgatttatgaaataactctttgacgggaaaatttaaaataaattaatttgctgcggcttttttaatcgctgcaaccgcagccttaagcacgcctaaaccatcgactttgccataaagcagcgagtcaattacttcaaccggtttgttgggtaacaaacgctggatttcgggcaacatataagcaatctgcggccctaataacacgacatcggcattctgacctttttcaccagccagtgtttccggaaatgcttcaataatgaccggaacttcatatttttctgcctgtgcgcgcatttttgataccagtaaagaggtagacatgcccgcagaacaaaacagataaatgtgtttcttttccataaaactgccctcatcgacgattatctgtcagccagacactccgcaagccttaacctgcttccatgctctgggtaacttgcgaaaccaacatgactttttttgtggctgaaaggagtatacggtataggcctgagcaatagtatttctttgaccttagaaattgtctctccttgacctgtggttatgaccctcttcacatttcgggcaaataattcgcgaagataattaagaacacaggccaaaaaaaaaccggcgcaatggccggtttccgttgttactcaagctttcaggcgaagtgattacttcgtagcctgtggatcagtgtcgtattcagcacaggtctgataaccggagttgatgacatgtccggtatcatctaacgcgacaaagtaggtttctgctttaccatcacgttgacccaggatgtaggtctggcaagtaccacgagcatggatcatgctcacttcagacgaaggtttacccgcaatttgtgcaacctgcgcccggctcatgccttttttgacgtctttcaccacaggctgtacaaactggtctttggtacgatcataagccgtacaacccgccagcatggttaataccgccgctgcactcagaattcctgccatattcttgttcatattccgtcctcttgtttatcagcgtgttagataagcctggaatacattgggcgctttttcaagcccgtgaacgaaacggctccgctttcagaggattcctgtatgacgttttaaccaccattcagcccgctgtcgcttgtcgtttcagtagcaacgggttagctttaaggacgttttgtcttttctgtctggaggggttcaatgacattgcaacaacaaataataaaggcgctgggcgcaaaaccgcagattaatgctgaagaggaaattcgtcgtagtatcgattttctgaaaagctacctgcaaacttatccgttcattaaatcactggtgctcgggatcagcggcggtcaggactccacgcttgccggtaagctgtgccagatggcgattaatgagctgcgccaggaaaccggcaacgaatcactgcaatttattgccgtacgcctgccctatggtgtccaggccgacgaacaagattgccaggatgccatcgcctttattcaaccggatcgcgtattaaccgttaatatcaagggcgcggtactcgccagcgagcaggcattgcgggaagcaggcattgaactgagcgattttgtccgtggcaatgaaaaagcgcgtgagcggatgaaagcacaatatagcattgcgggtatgaccagcggtgtcgtggtgggcaccgatcatgctgcagaagctattaccggattcttcactaaatatggtgacggcggtacggacattaatccgctgtatcgtctcaacaaacgtcagggtaaacagttactggcggcattaggttgcccggaacacctttataagaaagcgccaacggccgatcttgaagatgatcgcccttctctgccggatgaagtggcactcggcgtgacctatgacaatatcgacgactatctggaagggaaaaacgtacctgaacaggtcgccagaacaatagagaactggtatctgaaaaccgaacataaacgccgtccgccaattaccgttttcgatgatttctggaaaaagtaataatttgcacatattggtttgtgtgaaaaagagtactttgttcacgccggatgcggcgtgaacgccttactcgacctacaaaactatgcaaattcaatacattgcaggagtcgaataggcctgacaggcgtagcacgtcaaacggtgtaacctttgtcatcgacccgcctcttttttaatcgctctccgcctgttacactggatagataaccagcattcggagtcaacagtggtacggcgtttaacttctccgcggctcgaatttgaagctgcggcaatttatgaatatcccgaacatttacgttcattccttaatgacttacccacccgaccaggggtgtatctgtttcatggcgaaagtgacaccatgccgctctatatcggcaaaagcattaacatccgcagccgcgtcctttctcatttacgtaccccggatgaagccgccatgctacggcaatcccgacgcatcagctggatatgtaccgccggtgaaatcggcgctctgctccttgaagcgcgattaatcaaagaacaacagccactgtttaataaacgcttgcggcgcaatcgccagctctgtgccctgcaattaaatgaaaagcgcgtcgatgtggtgtatgccaaagaggtggatttttcacgagcccccaacctgtttggcctgtttgccaataggcgcgcagctttgcaagcattgcagaccatcgctgatgaacaaaaactttgttatggcctgttgggactggagccgttaagtcgcggtcgtgcatgttttcgttcagcgctaaaacgttgcgccggagcatgctgcggtaaagagagccatgacgatcatgcgctacgtttgcgccagtctctggaacgtttacgagtcgtttgttggccgtggaaaggtgcggtagcgctgaaagaacagcacccggaaatgactcaatatcatattattcaaaactggctgtggctgggggcggttaattcgctgaaagaagcgacaacgttaattcgggcacccgccgggtttgatcacgacggttataaaattctttgtaagccgctgctttccggtaactatgaaattactgaacttgatccggtgaatgaccagcaagccagttgatttcactgaacaacagtttaccttgcggttgcaaaagccgcagggtgtgcctgccatcgaaccagcacgcgccctggtcggtagtgagcagtttgtcgcccaattgccacgccccgtttattacaaacaccaccccgccgcgtgaaccaaaggtagtaaacgtacgttcggcaattctgactttcgccttacagacatccaggcgtgtcatgatgttgaaatccatcgacatctgccctgccgtcagtttcgcttttaccaccaggtccgctgcaaaggaaaaaggttgtaacggttttaaggtatggttaaagcggtctgcgctttcaaggaacatctcgccgccttccagcaacgtcactatcctttccataccgggaaacaaagaaaactccccattcgccgcgatggatgtaatgctggcacgccagtaaaaatcacgttttgccggtgggaaagtgcaaatttcgcgcgtttcaccggcagcgtttcgccacagattcaccgacattttacgcatatcaaagtattccatacccgctcccggcccgttcttttcattgttatcgttcaggtaaccgtggatggttatcggcaactcgggtgatttacgttagtggcgatcaggctttttttgcatctgtttgagaagagaaaagaaaaccgccgatcctgtccaccgcattactgcaaggtaatggacaagaccggcggtcttacgttttttggctgaaagattattcagcagttgcaggcattttaccttttgccgctggacgttctgtcagacgcttctcaaaattagcattaaattgctttttctgttccggcgtcaggatgttgtaaatcttgttctgggtttccatgtgcgccagcatgttagctttgcgctgttcttccatttttgcgatctgcgcttcagcttttgctttatcgaaggtatcgctggcaatgatgtcatgcattgcgcggcgttcttccagcggcggacgtttcatctggtcacgctggcctttcatgatttcgcggatctgctgtttctgcgcgtcggtcaggttcaggtctttgaacatcatgtcctcatgcggaccgaacttgcctttatggtgcatcatcggcttcgcgtcagccggtgctgcggtagtggtgtctgcggcatgggccaggttagccgcgccaagagccagggtagaggcaacaaacagtgcagttaatttacgcatattctatatccttcctttcagttatttattacggctttcttaagtagcgtgccgtgttgacgagattaactttactgactttagcgtcaattaatcagagcaacggtaaaacaatgaaagtgtaaaaaacacttttgcgccaattatggagaaaaaaagaaaatttgatggagagtgatgagagaatattacaacacgatgattttgcagagattatgaagaactataccggatgactggtgataaataaagcaaataaccaggattaatctgtattaatttataagaaagcaacttaatacccgcagaatgatttctgcgggtaagtattagcttattttttcgagcattaatcccgcacgtaatcccaacgctaccaacggattagggaataacacatactctacatcatgggttacggtaaaacgttcctccccgtcctgcgccagcaatgttcctttctcaaacggcataaaattcagcgtgtcatttgccatatgcatttcgaaggacggcgagtggcgagtaatttgcgaaaccacccgataacggagcggcggtgttctcacgataccgacactctcaccagatagcagcgcagcaattgcgctggcagttactgcaaactggcgaagatcgttttgcccaaagggcaacgctttgccaagttccagcgtacaggccagcgcgccaaaatgtctggcgctgaaatgggtaaacgtaccaccaggctcctgatggaacaccagcgcctccagccccgccgcacccagccacgtcagaaatttctcgtcccagggaatgtcgcgttgcggtaatacaccgaactgcggatgcaaggagccacgaattgcggtatgtagatcaaggtgccagcgcacagattctttgccctggtcataaaaatcttccaggcactgctccagttcgcgcgcccgacaggtttccccgctttcagcaaacagttgccaacgaccgccaaacattcgattcatatcgctatggcaataacgtttcccttgcttcagcgcaggaggattcccgaggatcaccagtaaccgccaacgtaacgggatctcaccgtgagatatcgcgccaagcaacgcgtccagcatttccacaggtgccgtctcattaccgtggatccccgctgaaatcaccagcacgccttgcggtggcgttaatggcgtcagttccagcacaccatcgcccagccagcgccagcgaacgccgttgatttctcgctcggtgatgaccggttttttacccgttaaggttagagcaagaaaattatccattgccccctccctcgcgctggaatggataaaccgaaccaagatccaataattgagtcagtgtatccagcgcttcccttccttcgcgcagcaattgtggatcggcaagatccgccgcagtaagacgatcgcggtagtaacgatccacccagtcattgagcgcattaaacagcgtatcgttcatcatcactgccggattcaccgcccggcgttcttcttctgtcaacaccacgcgcaaccgcaggcacgccgggccaccgccattcgccatgctttcacgtaaatcaaagacttttagttcgctaatcgggttgtcagcagcaagcaattcgttgagataacgccatactccggcgtgttcccgacactcctgcggcagcaccaacaccatggaaccatcatcgcggctcagcagttggctgttaaacagatacgtagataccgcatccgacacggaaacctgagtcgccggaacttctatcgccataaaaccattgacccgcgcacgcaggtttgccagtaactgtgactggcgagcgaacgcctgttgatggcaaaacagcacctggcggttactcacggcaatcacatcattatgaaaaacgccctggtcgataacgtcggggttttgctgggcgaaaatcacctgctgtggattcacctgattcagccttgccaccgcctcgctggcttcgcgagtctgccgcgccggatagcgggacggtcgggtatcattgccctcctctcgcccgtaaacaaaaatctgcattcccggttcaccgtaatgaccgccgagacgattatgattcgcggctccttcgtcaccgagcaaagccacctgcggcaacgccgaatggacgctaaatttctcttcgtcgttaaaaatcgcttttaacagcgattcggtgacgggggcttccagcgaacggtgaaatttattgttcaggttagcaacagtgagatgcactttgccatccagcgtatcggcggatggcgcgatcgttgccgcattggctacccacattggcgaagcggaactgacgctggaaagccagtgcggtgcctggcgtgcaactttttccagtacctgctcatcgctaccactgaatcccaactgacgcagcaccggaataaacggacgctcgtgcggcgggatcacggcctgggggaatcccgcaccggcaagttttttcattttcagtaagccctgttttgccgccagtcgcgggttagacacctgaaaacggtgacgggtagaggcttcattaccaaacgacaggcccgcgtaatggtgcgtcagccctaccagcccgtcgaaattgacttcccaggcgttcatcgcaccacctcatcggaaaaatccagcccggggttaagcgttgcgggcaacgttaacgagtccgactccagacttgccatcggccaggcacaataatctgcggcataccaggcgctggggcgatgattgccggaagcgccaatgccgccgaatggcgcggtactggcagcaccggtaagcggtttgttccagttaacaatccccgcccgtgcccccagcaacagttgatcgaatttttcccgctcgggggaaaccagaccgcaagagaggccgaagcgagtgttattcgccattcgaatcgcttcatcgaaattgtcataacgccagacgcgcaataacggcccaaacacttcttcatccggcacgccagtaacgcctgtcatttcaatgatccccggcgtcagcaacgatgtccctgcttgtaataagcgcggcgcaagcagggtccgtccgcccatcgcctccagttcctgccaggcagtaaccacctgctgtgcggcctgctcagaaatcagcccaccaataaatggctgcggttcgtcatcccaagtgcccggcgttaaccgctggctgacggcaaccatgcgagcaagaaatgcatcgccctgcgttccacttttcagaaataaacggcgggcgcaggtgcagcgttgcccggcagtgacaaacgccgactgaatggtcagatggacagcggcatcgatatccgccacctcatcgataattagcgggttattaccgcccatctcaagggcgagaattttctccggctgaccggaaagctggcgatgcagctggtagccggtattggcgctgccggtaaacagcaagccatcgagatcctccagcgcactcagcgcctgacccgttgcacgcccgccctgcaccaggttcagcacgcccggcggcaagccagcctgctgccataaacgcattaccgcttcgccactccacggtgtcagttcgctgggtttaaagataatggtgttacctgccagcaatgccggaacgatatgtccgttcggcaaatgaccagggaaattatacggcccaaacaccgccagcacgccgtgcgggcgatgtcgcaggctcgccgcgccgtccggcatttcgctacgctgctcgccggtacgaacgtgatacgccttaattgatatcgcgattttattgatcatcgccgtcacttcggttgccgcttcccagcgcggcttgccggtttctctggcaataatcgcggttaattcggctttattgctttccagcaatccagcaaagcgttcaactcttacctgacgatcgccaaatgagagccgagcccagcgcggaaacgccgcacgggcagcccgacaagcctgcccgacctgagcggcatcggcatcattgccctgccataacacctcgcccgataccggattacgcttcacacgcaatgcgccctggcccgttacccagtcaccgttgatccataaagtcatgctgttttctcctctgcgcacaggcgcaccagacgaacgcgatcccctgcgtggcatttgagggcatccagttgtgcggcggttgaaatcaaacgctcggtcgctggatcggtacgcaccagcaccacgcggaaatggtgataattttcattggcgaccaggcaggccggaaaatcgccctgcgcaggctgcccttcggccacttccaccagccgacttttacggatggcgcgcacgcggtcgatatcacattcaagtgtcggcccgccgtcaaagatgtcgatatagttacggtagcgaaaaccttctttctccagcaccgcacgggcaggcgcggtttgcggatgtacctgaccgatgacgtcctgggcttcctgggataaaaagtgggtatagatcggatgtttcggcatcagttctgcaataaatgccttttgcccggtgccgcagagaaaatcagcgcggctaaaatccatcgaaaagaagcgtttaccgaggctttgccagaacggtgaatagccgtgttcgtcaatcaccccgcgcatttcggcgaccactttgtcattaaacttgtcgcgaaaagccgccataaacataaagcgcgatttcgacagcaaatagccgttgccctctttgcgccacttcgggtcgagaaacagcgtgcacagctcgctgctgccggtgtgatcgttactgagaaacagcgtcggcaatgcgttatagacattcagctctttcgaagcgtgaaccagcgtgccgacgcgatagttgtaccagggatcgttcagcccaaccgccacctcaatggcgcaaatccccgccacagtgcctgtctcactatcttccagtacaaacacataaccctgctcacttttgggcagttcgccttgccaggttttgattgccctttcaatacgcaccgaaagcgtggcttcattggcgggaagcgacgtcaggccgccgcccgttttgctggcaagctgcatcagcgccgagacatctgagcgctcaacgggacgaatgaccatcatgatgaacctcggctaacaaagtgttcgcaagcagctgcaaagcgatccagtccggtcgtcacctcttcttcgctgacattgagcgcaggcgcaaagcgcaccacgttgccacccgcaatcagcaccatcacgcctgctttcaccgcttcctgagagatctgtttcgcttgcccggcgtaatcggcattcagtacacagccaatcaaaagacctaagccgcgaacttcactgaacaaactgtagtggtgattaatggaatttagacgctcaacaaaccagtcgtgacgctgtttaaccccgttaagcatctctggcgtgttgatgagatccagcactttgcctgccaccgccgaggccagcggattgccgccataggtggtgccgtgagtgccaacggtcatcacgctggcgcactcttcggttgccaacaacgcaccaaccgggaaaccgccgcccagcgctttggcggtagttaacagatcaggcgtcacgccgtagtgcatacaggcatacagttccccggtgcgcccgacaccggtttgtacttcatcaaagatcagcaacgcattgtggcggtcacacaattcacgcagaccttgtaaaaatgcgttgctggctggcaccacaccgccttccccctggatgggttcgacaatcaccgcacaggtggcgtcgtcaatcagcgcactggcagagttaatatcgttatatgcagcatgacgaatatccggcggcagtggcgcaaaatcctgtgaataggctggctgcccacccgcactgacagtaaacagcgtgcgaccatgaaacgcatttttgaacgccacgatgccgctcttatggctgccgtagcggtcgtgagcgaatttacgcgccagttttagtgccgcttcgttggcttccgcaccggagttacaaaagaagacgcgatcggcaaacgtggcgtcgatcaattttttcgccagtcgcagtaccggctcgttggtgtaaccgttgccggtatgccagaacttactcgcctgttcgttcagcgcctcacgcagttccggatgcgcatggcccagcgcgttcaccgcaatgccacccgcgaagtcgatatactctttcccctgctgatcccacaagcgtgaaccttcgccacgtaccggtataaacggtgccggagcgtaaacaggtatcatccattcatcaaagttttcacgcgtaattggctgagacatagcgacctctacagtaaataattcgttatttatatgttaataatgagtaatgtttgcgctgtaaatgtagattgcagggttcgtgccagccagtgataaaagtgcataaacggcggaggctaactggaaatcaagcagttataaccacatcatatgcatttaaagtgcatataaagtgaatacgtttgcgatgtgggtgaataaaaagaataaaaaacgcaatgttatgcagaagtaaaatataattctggaattgtgatcattgacgaaatttactggaaattactgcgccattctgacgcaacgcgcaccaaaagcgggcattttttgcgccatcgttgacatcattaacaaccatcgatcaaatcacttaacaacaggcggtaagcaaagcgaaattctgctaccatccacgcactctttatctgaataaatggcagcgactatgaaatttgtctcttttaatatcaacggcctgcgcgccagacctcaccagcttgaagccatcgtcgaaaagcaccaaccggatgtgattggcctgcaggagacaaaagttcatgacgatatgtttccgctcgaagaggtggcgaagctcggctacaacgtgttttatcacgggcagaaaggccattatggcgtggcgctgctgaccaaagagacgccgattgccgtgcgtcgcggctttcctggtgacgacgaagaagcgcaacggcggattattatggcggaaatcccctcgccgctgggcaatgtcaccgtgatcaacggttacttcccgcagggtgaaagccgcgaccatccgataaaattctcggcaaaggcgcagttttatcagaatctgcaaaactacctggaaaccgaactcaagcgtgaaaatccggtgctgattatgggcgatatgaatatcagtcctggcgacctggatattggcattggcgaagagaaccgtaagcgctggctgcgtaccggaaaatgttctttccttccggaggaacgcgaatggatggagaggctgatgagctgggggttggtcgataccttccgccatgcgaatccgcaaacagcagatcgtttctcatggtttgattaccgctcaaaaggttttgacgataatcgcggtctgcgcatcgacctgctgctcgccagccaaccgctggcagaatgttgcgtagaaaccggcatcgactatgaaattcgcagcatggaaaaaccgtccgatcacgcccccgtctgggcgaccttccgccgctaatttagctgatctcctggctcaaactgggtcaggagaattaaccttgagaaaaatcaacaaactgtcagtaatgatttgttgcctgccgtcctttgttataccgtcactgcgtttttagttgtctgaccacttctctattatcaagtttgatataggaaactccacgatgaacgctgagcgtaaatttcttttagcctgtcttatttttgcgctggtcatttacgctatccacgctttcggtttattcgatctgctcaccgatttaccccacttacagacactcattcgccagagcggattgttcggctatagcctctatattctgttattcatcattgccaccctctttctgttaccaggaagcatactggtgatcgcgggaggaatagtttttggcccgctcttagggacactactatcattaattgccgccacgctggcctcctcgtgctcattcctgctggcgcgctggctgggacgtgatttactgctgaaatacgttggccatagccataccttccaggccattgaaaaaggcattgcgcgtaacggtattgattttcttattctgacccgcttaataccgttgtttccttacaatattcaaaattacgcttacggattaaccacaatcgccttctggccttatacccttatttcggcactcacgaccctacccggtattgttatttataccgtgatggcaagcgatctcgccaatgaaggcattacgctgcgctttattttacaactctgtctggcgggcctggcgctgtttattctcgtccagctcgcaaaactctacgcccgacacaaacatgtggatctgtctgcttctcgccgcagcccactttctcacccaaaaaatgaaggatagaacgatgttgcaacattattcagtgtcatggaaaaaaggactggctgcactctgcttactggctgttgctgggcttagcggctgcgatcaaaaagagaatgcggctgcaaaagtggaatacgacggactttcgaacagccaaccgctgcgtgtcgatgccaataaccatacggtaaccatgctggtgcaaattaatggtcgtttcctcaccgacgacactcgtcacggtattgtgtttaaagatggctccaacggacataaatcgctgtttatgggttatgcgaccccgaaagcattttatgaagcccctgaaagaggcaggtggtacgccgggcgaaaacatgacgatggataataaagaaacgactcatgtcacaggcagcaaactggatatttcggtcaactggcaaggggcggcaaaagcgtattccttcgatgaagtgattgttgacagtaatggcaagaaactggacatgcgctttggcggtaatttaacggcagcagaagagaagaaaacgggttgcctggtgtgtctggatagctgcccggtcggcatcgtcagcaatgcaacatacacttatggtgcggtggaaaaacgcggcgaagtgaaattcaaaggcaatgcctcagttctcccggcggataacacgctggcaacggttacctttaaaatcaccgaataaagcaggataacggatgatgaagatgcaatcgcgtaaaatctggtactaccgtataaccctcatcatcctgttgttcgctgtgctgctggcatgggcgctgcttcccggcgtccatgagtttatcaatcgcagcgttgcggcgtttgccgccgtggaccaacagggtatagaacgctttattcagtcttacggcgcactagcggcagttgtctcgttcttgttgatgattttacaggccattgctgcaccgctacctgcgtttttgatcacctttgccaatgcgtcgctgtttggtgcgttctggggcggcttactgtcgtggaccagttcgatggccggcgcggcgctgtgcttttttatcgccagagtgatgggccgcgaagtggtggaaaaattaaccggcaaaaccgtacttgacagtatggacggctttttcactcgttacggcaaacacaccatcctggtatgtcggttattgccttttgtccctttcgatccaatcagctatgctgccggtttgacttcaatacgttttcgctcgttttttatcgccaccgggcttggtcaattaccggcgactattgtttattcctgggcgggcagcatgttaacaggcggtactttctggtttgtcaccggactgtttattctgtttgccctgaccgtggtgatttttatggcgaagaaaatatggcttgagcgccagaagaggaatgcctgatgggtttaccgccgcttagcaaaattcctttcattttacgtccgcaggcgtggctgcatcgtcgccattacggcgaggtgctaagccccattcgctggtgggggcggatcccgtttatcttttatctggtgtcgatgtttgtcggctggctggagcgcaaacgctcaccgctcgatccggtagtacgatcgcttgtcagcgcgcgcattgcgcaaatgtgcctgtgtgagttttgcgtggatatcaccagtatgaaagtcgccgagcgtaccggcagcaccgataaactgctggcagtggctgactggcggcaaagcccgctctttagcgatgaagaacggctggcgctggagtacgccgaagccgcaagcgtaacgccgccaacggtcgatgatgccctgcgcgcccgactggctacgcattttgacgctcaggcgctcaccgaactgacggcattgataggcctgcaaaatctgtcagcccgttttaattctgccatggacattcccgctcaggggctgtgccgtattcctgaaaaacgttcttaaggagagaagatgcgccattgtgggtggttgctgggattgttatcgctgttttctttggcaacacatgccagtgactggcaggaaataaaaaatgaggccaaaggacaaaccgtatggtttaacgcctggggcggcgataccgcaattaaccgctatctcgactgggttagcggcgagatgaaaacccattacgctataaacctgaagattgttcgtctcgcggatgccgcagacgcggtgaaacgcattcagaccgaagttgctgccggacgtaaaacgggcggttcggtggatctgctctgggtgaacggcgaaaacttccgcaccttaaaagaggccaatttattacaaacgggctgggcggagactctgcccaactggcgctatgtcgacacacagcttccggtgcgggaagatttttcagtgcctacagaaggggctgaatcgccctggggcggcgcacaactgacgtttatcgcccgccgcgatgttacgctacagccaccacaaacgccgcaagccttactggagtttgctaaagccaatcccggcacggttacctatccgcgcccaccggactttaccggcacggcgtttcttgaacagttgctgattatgctaacgccagatcccacagcattaaaagaagcgccggacgatgcgactttcgcccgcgtcactgcgcccttgtggcaatatcttgatgcactgcatccgtatttatggcgcgaaggaaaggatttcccgccttcgcccgcgcggatggatgctctgctgaaagctaacacattgcgcctgtcgctgacctttaaccctgcacatgcgcagcaaaaaatcgccagcggcgatttgcctgcaagcagttacagttttggttttcgcgaggggatgattggcaacgtccatttcgtcaccattcctgccaacgcgaatgccagtgctgcggcgaaggtagttgccaatttcctgctctcacccgatgcgcaactgcgtaaagcagatcccgctgtctggggcgatccttctgttctcgatccgcaaaaactgcctgacgggcagcgcgaatcattgcaatcgagaatgccgcaggatctgccgcctgtactggctgaaccgcacgcaggttgggtaaatgcgctggaacaagaatggctacaccgttacagtacgcattaatctttttgctgtgggcgatgatggcggtgatttatgcaccgctgatcccggcagctctgacgctgatatcgcctgctttgtcgttgacgcactggcaggcgttatttgccgatccacagttaccgcaggcattactggcaacgctggtgtcgacaaccattgcggcggtcggggcgttgttgattgccctgctggtgattgtggcgctgtggccagggccgaaatggcagcgtatgtgcgcccgtctgccgtggctgctcgccattccccatgtggcttttgccaccagcgcccttctgatctttgctgacggagggctgctttatgactatttcccgtatttcactccgccaatggacaaattgggtattgggctgggcctcaccctggcggtaaaagaaagcgcatttctgctgtggatcttagcggcagtattgagcgaaaaacggctgttgcagcaactcattgtgctggattcgctgggctacagccgctggcaatgcctgaactggctgctgttgccctccgtcgcgtctgcgttagcaatggcgatgctggcgattgtcgcctggtcgctgtcggtcgtggatgtggcgattattcttgggccaggtaatcccccgacgctggcggtaattagctggcagtggttaactcagggcgacgccgatcaacaaacgaaaggtgcactcgccagcctgctgctgatgctgttactcgccgcctacgttttgctgggctatctgctatggcgtggctggcgacgtactattccccgcgtagatggcgttcgtaagcctgccacgcctttattgccaggcaatacgctggcgagttttttacccttaaccggtgtgctgtgtgtggttctgctggcgatcctcgcggatcagtcgacgatcaatagtgaagcgctcatcaacagcctgacaatggggctggtggcggcattcatcgctttgctcctgttactgctgtggcaggaatgggggccacagcgtcgccagttgtggctatggttgcccattttattacccgctctgcctctggtggcgggccagtacacgctggcgctatggctgaacctggatggaagctggacggcggtggtctgggggcatctgctgtgggtaatgccgtggatgctgtttatcctgcaacccgcctggcagcgcattgattcacggttaattttgattgcgcaaacactgggctggtcgcgggccaaaatcttcttttacgtaaaatgcccactcatgttgcgccctgcgctgattgccttcgcggtgggattttcagtcagtattgcgcagtatatgccgacgctgtggctgggcgcggggcgttttccgacgctcaccactgaagcggtggcattaagcagcggcggcagcaacggtattctcgccgcccaggctttatggcaactgctgttaccgcttattatttttgccctgaccgcgttagtcgcaaaatgggtaggttatgtcagacaaggactccgctaatgctctgcgtgaaaaatgtttcgctacgtttaccagaaagccgcttgctgacaaacgttaacttttcagtagataaaggtgacattgtcacgttaatgggaccatccggctgcgggaaatccactctgttttcgtggatgattggtgcgctggccggacagttttcttgtacaggggagctatggcttaatgagcaacggattgacatgctacccaccgcacagcgtcagattggcattcttttccaggatgcactgttatttgaccagttcagcgtcgggcaaaatttactgctggcgctaccggagacatttaaggggaatgcccgacgtaatgccgtgaatgatgcacttgagcgttcaggccttgacggagcgttccatcaggatcctgccactttgtctggcggtcagcgagcgcgcgttgctctgctgcgcgcccttctcgctcagccaaaagcgttgctactggatgagccattcagccgtcttgatgtggccctgcgcgataattttcgccattgggtgttcagcgaaattcgcgccatggcgatccctgttgtgcaggtgacgcacgatcttcaggatgttcctcctgatagccccgttctggatatggcgcagtggtcagaaaattacaacaaactgcgataacgcaaagtttttcccgatgcgtcagttcagaatggcgctctcaaaactacaatgtcgggattttcgatgaaacgtgtttctcaaatgaccgcgctggcaatggctttagggctggcttgcgcttcttcgtgggccgctgaactggcgaagcctcttacacttgaccagcttcaacaacaaaatggcaaagcgattgatactcgccccagcgcgttttataacggctggccacaaaccttaaatggcccttccggtcatgaacctgccgccttaaacctctctgctagctggctcgacaaaatgagcaccgaacagctcaacgagtggatcaagcaacataacctgaaagccgatgccccggtggcgctgtacggtaatgacaaagatgtcgacgccgtcaaaacgcgactgcaaaaagcaggttttacgcatatctccatcctgagtgacgcgctaagcgaaccttcccgtctgcaaaaactgccgcactttgaacagctggtatatccgcagtggctgcataacctgcaacaaggtaaagaggttacggcgaaacctgccggtgactggaaagtcattgaagcggcctggggcgctccaaaattttaccttatcagccatattcccggcgctgactacatcgacaccaacgaagtggaaagcgaaccgctgtggaacaaagtttctgatgaacaactgaaagcgatgctggcaaaacacggcattcgccatgacaccacggtcattctgtacgggcgtgacgtatacgctgcagcgcgtgtggcgcaaattatgctttatgccggcgtgaaagatgtgcgcctgctggacggaggctggcaaacctggtccgacgcgggtctgcccgttgagcgcggaacgccaccgaaagtgaaagcggaaccggatttcggcgtgaagatcccggcacaaccgcaactgatgcttgatatggaacaagcgcgtggactgctgcatcgccaggatgcatcgctggtgagcattcgttcgtggccagaatttatcggtacgaccagcggttacagctatattaaaccaaaaggtgaaatagccggagcacgttggggacacgcaggtagcgactcgacgcatatggaagatttccataacccggatggcaccatgcgcagcgccgatgatataaccgctatgtggaaagcatggaatatcaaaccagatcagcaagtttcattctactgcggcactggctggcgcgcgtcagaaacctttatgtacgcacgcgcaatgggctggaataacgtctccgtttacgacggtggctggtacgaatggagcagcgatccaaaaaatccggtagcaaccggtgaacgcggcccggacagcagtaaataacattgcaattactgacgctggagcgacttcagcgtcagatacccactccacacccgcgtaaaggtcgtcatccagcacaacgcaccaaatacccacgcaaaccacggaaaacaggccggaaagaggcaactcagaacaaacagcaaaatcgtctcgctgccttcggttaacccgcccagataataaaacgatttatgcgcataaccgggattatcaatctgatgtttcgccgccagcgcagcaaaagcgagaaaactgcttcccgtgccgataaacgcaaacagcagccagccgcctgccagggcgttttgctccggtgcggcgaggataaacccaaaaggcaccagcgcgtaaaaaagaaaatcgagagaaatatcgagaaagccgcccgcgtcggtaagccctctgcgccgcgccagcgcaccgtccagaccatcaagcagcctgttcaacaaaatgacgattagcgccgccagataccagcccagcgccagaaaaggcagtgccagcacgccgatggcaaatcccactaatgttaaaccatctggcgtaatgcccggtttatcaagaacccgcacgcactgatgcaacaacggtttaatccggggatgaagatggcggtctagcacaggcactccttaaatataaaacctttctgattgagcaacagtgcggatattatggcatttttcgcttatctgcccgtgtgtaatttatgaaaatgattgaagttgttgccgccatcatcgaacgtgatggcaaaattttactcgcgcaacgccctgcccatagcgatcaggcgggattatgggagtttgccggtggtaaagtcgagccggatgaaagccagcggcaggcgctggtgcgtgagttaaacgaagaactgggcatcgaagcaactgttggtgactatgttgccagccatcagcgagaagtttcggggcggattatccatcttcatgcctggcacgtacccgacttccacgggacgttacaggcacatgaacatcaggcgctggtctggtgctcacctgaagaggcgctgcgatatccgctggcccctgctgacattccattattagaggcgtttatggcttcacgcgccgccagaccagcggattagtgcttagggttttgtcatcccgttggcattgcagcagtattccttcggctttaattactgccccttcagaataattttgatcctgataaacgcagcactgagtacagggctgcgctgactgcccgcctgaactgaacacttctggcggtacgtttacctccacgtccggatgataatgcgggttagccagtgtaattaatggaaatgctaatactacggcgatcaatgctcgactcacagggaactccttaacgttattgtctcttctacagataacggtagccgggcggcaaaactttagcgtctgagttatcgcatttggttatgagattactctcgttattaatttgctttcctgggtcatttttttcttgcttaccgtcacattcttgatggtatagtcgaaaactgcaaaagcacatgacataaacaacataagcataatcgtattaatatataagggttttatatctatggatcagacatattctctggagtcattcctcaaccatgtccaaaagcgcgacccgaatcaaaccgagttcgcgcaagccgttcgtgaagtaatgaccacactctggccttttcttgaacaaaatcccaaatatcgtcagatgtcattactggagcgtctggttgaaccggagcgcgtgatccaatttcgcgtagtatgggttgatgatcgcaaccaggtgcaggtcaaccgtgcatggcgtgtgcagttcagctctgccatcggcccgtacaaaggcggtatgcgcttccatccgtcagttaacctctccattctcaaattcctcggcttcgaacaaaccttcaaaaatgccctgactactctaccgatgggcggtggtaaaggcggcagcgactttgatccgaaagggaaaagcgaaggcgaagttatgcgtttctgccaggcgctgatgactgaactgtatcgccacctgggcgcggatactgacgttccggcaggtgatatcggcgttggtggtcgtgaagtcggctttatggcggggatgatgaaaaagctctccaacaataccgcctgcgtcttcaccggtaagggcctttcatttggcggcagtcttattcgcccggaagctaccggctacggtctggtttatttcacagaagcaatgctaaaacgccacggtatgggttttgaagggatgcgcgtttccgtttctggctccggcaacgtcgcccagtacgctatcgaaaaagcgatggaatttggtgctcgagtgatcactgcgtcagactccagcggcactgtagttgatgaaagcggattcacgaaagaaaaactggcgcgtcttatcgaaatcaaagccagccgcgatggtcgagtggcagattacgccaaagaatttggtctggtctatctcgaaggccaacagccgtggtctgtaccggttgatatcgccctgccttgcgccacccagaacgaactggatgttgacgccgcgcatcagcttatcgccaatggcgttaaagccgtcgccgaaggggcaaatatgccgaccaccatcgaagcgactgaactgttccagcaggcaggcgtactgtttgcaccgggtaaagcggctaatgctggcggtgtagcaacatcgggcctggaaatggcgcaaaacgctgcgcgcctgggctggaaagccgagaaagttgacgcacgtttgcatcacatcatgctggatatccaccatgcctgtgttgagcatggtggtgaaggtgagcaaaccaactacgtgcagggcgcgaacattgccggttttgtgaaggttgcggatgcgatgttaagccagggcgtgatttaatcgttattacaatcgtctggttttccttataaccagacgattttccctgagttaattaaatccttagcagacgtttgcaatttgcagccgtttgttctgcatcctgaatatcctgttcagacattaagcatcgcaacgcatctttttcaatccaggggttgttatttccggcaattgttagccacatccatgcttgtttattatcaattttagtgcccgtcccctgagcatacattgccgcagtctggtgctgcgcttcggtcgcccctaaacgcgccgctttttcgtaccagtgcagcgcatgattttcatcttttgcgatatattttgtaccgtacagatacatttcagctaacaaaaatatcgcctctattcgaccacgctgcgctgcaccagtaagccattgagtagcctctgcgttattttcaggatcatcattgttggttaaataatatttccccaattcatacatggcatcccctgccccatctgccccattttttgctgctttggtaaaccagtacagcgctttttcctggtcctgtggaatactctcacttccgctatacaacctggcagtatgatattgcgcatgtaaatatccctgttctgctgattgcaaaaaccaacgatgggcctgaacctcatcgcgctccacgccaatcccttgtatatacatttgtcccaactcatactgggcaacctcatgtccttgtgtggcggcagataaataccactgcaatgcttcttcataatttcgtaatggctcaacagcaaagcgtgagatacgggcaagctcatattgcgcagatgtgttgccattttgggcagcaagtaaaaaccattttcgtgcctcacaaatattcttatccgtgccccttccatcgctatacatgatacccagcgcatacagagcatcgataacattatgctgcgcggcgcgggtaaaccagttaaaggctaattttagatcctgtgaaacctcatcaccttcgtaatacattttgccaagagaataccaggctagtgaatagccttgctctgcagcatgtaagcaggactggtatacagaagatggataataaaaaagaccttttaattttatggcatttagcagctttttatatccactatgatgttgcattgctaaattattgaagcgttctgttaatttccacttgcgaatcattttttcttttcgcaaggaatatgataaacactctattaacaatgccatatagttgtctgatagttcaaattcagcaactttatttaatactgcgatatcaaaccatttcaggctctcttcattatcctttaatgattgataaatcgtagccatttccttcccgttttccatttcttccagtggagacaagttactggcaaagaaaggggtaatttgtttttcgatgcgataataaagaagacaactttcgttaatttctgtctggattacgggttgacgactgcctgcgactaaatgccatctgaacgtttgtgctgcagcgagagttaataatggccggaatacccgatgaagatgcagtaataacgtttcttcaaagcacattcgtgagctgagatcttttttctcaaggaaagataacgccttagcaagttgcatgggggcgtgttcgggggttgcttcattctcctcacagagcatatccagcacggctcgccaggtgaattccccctctgatttaatagtgacatcaggaagtggatgaccagaaaaggtgttgggtgcgcgaaatgtcatcacaggacgaggatgaacaatacccctggacatattgatcggttgctcttcttcctcttcttgccactgatcttcgtcgtcataacgtaaagcctgttcataagcatcgtgcaattgttgccaggctgcgggatcatcttccgggcggcaattttttaccagttgcgcataacgacgcttaatatctcgttcttccgcacctggttgtaaagctaatatttcccagcagttcattgcagacgttctctttccagagagtctaatgtaggttcaactttagtccgaaaatcagcaagttgatcaggatcctgcttctcgagtagataactgaaatgacgggagcaattgcttatccagtctcgcgtttccgccagggtgagttgatagagattatcaagacgggcaataaaggcctggtttatctgttcatcgcgtgggtgaatttttaacaggcttaatttggacaacgactgctgtatttgttctgccgttaatgcccctggattctgttcaataaccagactatttttagcacctgtcagtggcacgctgatatcgacatcaagaataccgttaatgtcgtacgtaaaacgaacatcaatacgcacatcaccggccggttttggcggaacattcactgacaactccgcaaggaaaatattatcagccaccatcctgctttcaccctggtagattttaaaattaacctctgtttgttgatcatgtgccgtgtaaaaggcacgaacgcgactacaaggaatactcctgttacgctcaataacgggtgcaaaatagcctgattcgcgggtatgccccagcgatttagaggtatcaacgccaagcgtataagggcaaacatcagtcactacaacatctcgtaattcgctgtgccgcgctttaagtgctgcctgaatagccgcgccctgggcaatgacttcatccgggtttaaatgcattgccggtatacgaccaaataatcgtgtcacaagtttgcgaatcagtggcatacgtgtagtgccacccacaagaacaacctggtctaattggctaaaattaattttggcatcgcgaattgcccgctccagtggcatatggattcgttcgaaaaaggtctgtaataaaaattcaaatttttctgtagtcagatgccagtaatatcgccttccttcaatctccacactgaaagtggcttcatctcgcacactcagcacgcgtttgacacgctcagcctcgatgcgtaaatgccgctggagtgtcggttcacgccattcaatattttcaggaagatcccgacgtgagcaatatgcatcgatcaggatatcgacaatatcttcaccacctaaaaagttatccccggcactggcacgtacttccataatattgtcaaacaactccagtatggagacatcaaacgtaccaccacctaaatcgaataccagaaattgatgttcatcatccttattatgcaaaccatacgccagtgcagcggcggttggttcgttaattaaacgttcgacatttaagcctgccattgtcgcagcggcttttgttgctttacgttgcatatcaccaaaatatgcgggaacgctaatcaccgcttcagtgacttcttcgcccaaatagttttctgcatcttcttttagctgacgtaatatcaacgatgagagttcttccgcacgaaattcccgtccgcccagttttaacgtctttgatgtgcccatcatgcgtttaaaatttgatgcgcagttttgtggtttgatgagttgcaggtcacgagctgcctcccctgtcaaaaccataccatcttcgtcaacacaaactacgctgggtgttaaaaacttacctaacgcattggggatcagttcactttgtccatttcgccagacagctgccaaactgttagttgtacccaggtcgataccgataatcatcgtaattctttttaatatccttataaaataattgttttaaatggtggtatttaaaccaccattttgttcttaatttttgtataaagaccaggtacgttctagtatttttaatgcagcaggtaactgctcaatcattttaccagaaacttcataatcgctttctttgttgtttaatggattaacagcaacgtaggaaatcgttgatgttggcttaattattttaaaaacttcctttgcagattcaccatagatgaaaggtaactttgaattaatagagatttcttgtttatcgaccataaacctggtaatagcagagaaatgagtctccccatgacttataacatagcctttcggaacgttaatttctttcagctcaggaatatactgaacataaaactgtaaatctttcacatagcaaaattttgcactactatcattattcttcgatttacggttttcgcattccatttcccatgaaaatagtccgtctccgatgtaacctgcaactacgcgtccatgacttaaatggtatgcaacgccgtcaacagtgccttgctcttctgaagaaaaactgaattctttattttcttcattatacggactgatagaacaaactatctttccttgaggaaaaattggtcttttggtgaataacatatcctccgacaaaatggtaaaaccatcaatggtggtaattgtttttttaattaaatactcactgcaattgacttcctttaaggcttcttgtttttgagcccatgataattctgcagttgttaatttacgataaaatttttcagtgtaactttcagccgccgcaaagtgtgacagtgacgataaaacaataattcccatgaatgtttttttcatgtatatatccttataggtatgcttatcaaataattcaatggaagtatatcgataaaaataaagccgaacatgttaataaacatactcggctttattttcggaattacacccctattgttcagtcacgcttaactgtagcatcctttttctgcgcagtttttttgaccctttttttcacgtctttatttttctcgtctccgttccttggtaccacaattcctttaaaccgtctgaccggagtgctacgagcctgatcaatcaactggtacaatgtccccaccagcggctgcataaagtcctgatagcgacactgcttttcgctgatttgcgtcagcaccgattcccagtgcgcggtcatgtccggtcgcgtcgccatttctggcagcgaatggaatagcgcttttccggcgtcggtggagtggatatagcgcccttttttggtcaggaagcctcgcttgaacagcagttcaataatcccggcgcgagtcgcttctgtccccagaccatcggtcgcacgaaggatctttttcagatctttgtcctgcacaaagcgtgcgatcccggtcatcgccgaaagcagtgttgcatcggtaaaatggcgtggcggctgggtttgccgctctaccacttcacctttttcgcacaacaattcatcgcctttcgccaccacaggcagcggcgtgccgtcgttttcttcatcgcgctctttgctgcctaacagcgtgcgccagcctgcttcagcaagaaaacgggctttagcgacaaatttgcctttggcaatgtccagttcgataacacacttgcggaacaccgcatccgggcagaactgcatcaaatactgacgggcaatcaggttatagaccttcgcttcgttctccgtcaggttgatcgcagaactccgtgcggtcggaatgatggcgtggtgcgcatcgacctttttgtcatcccaacagcggttgcgtatatctggatctaccactggctgcggcaacagatccggtgcatgaacgctgatagcattcatcaccgcgtggcgtccggcaaaatgttcttctggcaaatagcggcaatcggaacgcggataagtgattagcttgtgcgtttcgtacagcttctggcagatatcaagcacgttctgcgcgctcagaccaaaacgtttagccgcttcaatctgcaacgccgaaagcgaaaaaggcagcggcgcggattctgattcccgtttatcgttatagctggtgacaatagctggttgaccactaatgcggttaaccacatgctccgccagtggacgatgtaacaagcgcccttcttcatcctggtacggttcacacgcttcgctcggttgccagatagcggtaaaccgctcatctgcaggtgtcacgatatgtgctttgacttcaaagaagtctttcgccacgaagttttcaatctcttcgtcgcggcgcaccaccagtccgagtacgggcgtctgcacgcgtcccacggaaagcacgccctgataaccggcattgcggccgagaatggtatacgcacgggtcatattaatgccgtacagccagtcagcccgcgcccgcgccagtgcagaaacgcacagcggtacaaactcgctattggagcgaagacgatcgatcgcccgctcaaccgcctgcgggttcaggtcgtttatcaaacaacgctgtacctgctggcgcttttccggtgctagttgcaggtagtccagcacttcatccaccagcagttgcccttcgcgatccgggtctccggcgtgaacgatttcgctggcttcatgcaggaagtgtttgatgacattaagttgtttagtcacggagggtcggggctgtaattgccacttttccgggacaattggcaaatccgcaagattccagcgcgcatagcggctgtcgtaggcgtctggctgcgcctgctcaagcaggtgaccgatacaccaggtcaccacctgaccattaccgcactcgataaagccatcgcctttccggtgcggtttaggcaggacatcagcaatggcgcgcgccagactcggtttttcggcaataaacaaccgcattgaattaacggatctcaaccatggcacgaccgccgcgcgctggcaccagttcgccaatcgccgtcagttcaatgccaaactcggcggctgtagctttgacctcattttctgcttccggcatgaccgccagcagcaaaccgccagaagtttgcggatcgcacagcagatcgcgcacttcacgcggcatttcacccatcagatgaccgtagctggcaaagttacgttcggtgccgccaggcactgcgcccaacttaatgtactcttcaacccccggcaatttcgggatcgcgtcatagtcgacgcgcgcctgcacacctgcgccctgacacatttcgcttaaatgccccagtaaaccaaaacccgtaacgtcggtcatcgcttttacgccttcgatgttggcaaaggacgcgcctgcgatgttcatccggcacatcacttccgtcgccagtccctgatgttctggtttcagcagtgattttttctcagccgtggtaagaacgccaatccccagcggtttcgtcaggaacagtttgcatccggcttgtgcggtactgtttttcttcacccgctcggtcggtacgatccccgttaccgccagaccaaaaatcggctccggcgcatcgatggagtgaccgccagccagcgcaatccccgcctgacggcatgcatagcgtccaccttcggtcacttcgcgggcaatttccggggaaagtttgttaatcggccagccgaggatcgcaatcgccataatcggtttgccgcccatagcaaagatatcgctgatggcgttagtcgccgcaatgcggccaaaatcgaaaggattatcaacgatcggcataaagaagtcggtggtactgataacgctggtgccattgcccagatcgtataccgccgcatcgtcgcgggtttcattacccacaagcaaattcggatcaacaaacttcgcctgctcactgtgcaggatggtttccaacacttttggggaaattttacagccgcaaccagcgccgtggctgtattgggtcaaacgaatcgagttctcgctcatggacatctcctgtcaatgcaatccgggtatggtaaccctcattccatgaagtgataagtgagagtgtctgaattcctgcgcctttgctcacaatccagacagtttcgcgacaattatcagaaataagtcacaaacggcgtcgggtccgggacgtttatcgacgtagatgctttcaactgcggcgtaccgaggtagagaaaaccgacaattttatcctgctcacggcaaccgaatgcttcacggactaccggactttcagttaatgcaccactgcgccagatgccgccaaacccctgggcaactgctgccatttgcatcgccatgaccgcgcatcccgcagacatttcctgttcccagcgcgggactttatgattttcttcgcatttcgccaccaccgttatgatgagcggtgcgcggaacggcgcattacgcgctttgttgattgctttgttatcactaccggcagcaatcgccccctgctccagtacagcgctgaaacgctcgcgcccttccccttcaatcacaaagaaatgccacggttgcatggacttatggtccggcgcacgcatacccgcacgcaggatgttttgcagttgttcacccgttggcgcgggttcagccaggcgggaggcgctacggcgattgatcaatagttcgagtgcatccatttgattaactcctgtcatgatatttattcacaaaattaacacgagagtggattttgttacagcccagtccgcaattcctgctgacaagtgccggttgggtcattacgataaccacatctattgcgcctgaaacaggtgtgaccttaagttgggagaatacatgcgaaccctttggcgatttattgccggattttttaaatggacgtggcgtctgctgaatttcgtccgtgaaatggtacttaacctgttctttatttttctcgtgctggttggtgtggggatctggatgcaggtcagtggtggtgattcgaaagaaacggccagtcgtggcgcactgctgctggacatttctggtgtgatcgtcgataaacccgacagttctcagcggtttagtaaattaagccgccagctgcttggtgccagttccgatcgtctgcaggaaaactcactgtttgatatcgtcaacaccattcgccaggcgaaggacgaccgcaatatcaccggtattgtgatggatctgaaaaacttcgcaggcggcgaccagccgtctatgcagtacatcggcaaagctctgaaagagtttcgtgatagcgggaaaccggtttatgccgttggcgagaactacagccaggggcaatattatctcgccagtttcgccaataaaatttggctgtctccgcaaggcgtggttgatctgcacggctttgccaccaacggtctgtactacaaatcgttactggataagctgaaagtttccacccatgtgttccgcgtgggtacgtataaatctgccgttgaaccgtttattcgtgatgatatgtcgccggcagcccgcgaagctgacagccgctggattggtgagctgtggcaaaactatctgaatactgttgccgctaaccgccagatccctgctcagcaggtattccctggcgcgcaagggttgcttgagggtttaaccaaaaccggtggcgataccgcgaaatatgcgctggaaaacaagctggtcgatgcactggcatcgagtgccgaaatcgaaaaaactctgaccaaagagttcggctggagtaaaactgataaaaattatcgcgccatcagttattacgattacgcattgaaaacgccggcagataccggtgacagtatcggtgtcgtcttcgctaatggcgcaattatggatggcgaggaaactcaggggaatgttggcggtgataccactgcggcacaaatccgcgacgctcgccttgacccgaaagtgaaagcgattgttctgcgtgttaatagtcccggcggcagcgttaccgcgtctgaagtgattcgcgctgaactggcagcagcccgggcagcgggtaagcctgtggttgtatcgatgggcggcatggcggcatctggtggttactggatttccacaccagctaattacattgtggctaaccccagcaccctgaccggttctatcggtatcttcggcgtgatcaccaccgtagaaaatagtctggattcgattggtgttcatactgatggtgtctcaacttcaccgctggcagatgtttctatcaccagggcactgccgccggaagcgcagcagatgatgcagttaagcattgagaatggctataaacgctttatcacgctggttgctgatgcgcgtcattcaacgccggagcagattgataaaatcgcccagggtcacgtctggaccggtcaggatgcaaaagctaacgggctggtcgatagtctcggggatttcgatgatgcggtcgccaaagcagcagagctggcaaaagtgaaacagtggcatctggaatactacgttgatgaaccgaccttcttcgacaaagtgatggacaacatgtctggttctgtccgggcaatgttgccagatgcgttccaggccatgttacctgcaccgctggcctcggtagcctctaccgttaaaagtgaaagcgacaagctggccgcgtttaacgacccacaaaaccgttatgcgttttgcctgacctgcgccaacgtgcgttaagtcttgtactaagtggccgacagatcgtcggccacattactttttacgtcgacgaatcctcttcccgctgtctcgccacatatttccttatcctcatagtatcaggtgcgctccccctgcctcacgtatatacttttgctctttcgatatcattcatatcaatatcatgcaaaagaaatcaatttacgtcgcctacacgggcgggaccatcgggatgcagcgttccgagcagggttatattccggtgtcaggtcatctacagcgccaactggcgctgatgccggaattccatcgcccggagatgccagatttcaccattcatgaatatacgccattgatggattcttctgatatgacgccagaagactggcagcatattgctgaagatattaaagcgcactatgacgattatgatggttttgtcattctgcacggtacagacacgatggcgtataccgcctctgcactgtcgttcatgctcgagaatctcggtaaaccggtcattgtgacagggtcacaaatcccgctggctgagttacgctctgacggacaaattaatctgctgaatgcgttgtacgttgcggcgaattatcctatcaacgaagtaactctcttttttaataatcgactgtatcgtggcaaccgaaccaccaaagcacatgccgatggttttgatgcgtttgcctctccaaaccttcctccgttactggaagcaggtatccatattcgtcgtttgaatacgccacccgtcccgcacggtgaaggggcattgatcgttcatccaatcacgccgcaaccaattggcgtagtgacgatttatccggggatttctgctgacgtcgtgcgcaattttctgcgccaacctgtgaaagcattgattctgcgctcatatggcgtgggtaatgcgccacaaaacaaagccttcctgcaggaattacaagaagccagcgatcgcggtattgtggtggtcaacctgacacaatgtatgtccggtaaagtgaacatgggtggttatgccaccggtaacgccctcgcccatgccggcgttattggcggtgcagatatgactgtagaagccacgctaaccaaactgcattacctgcttagccaggaacttgatactgaaaccattcgcaaggccatgagccaaaacctgcgtggcgaactgacgccggatgattaaggagactgcaatgccccctcgcgccctgttactggtcgatttacaaaatgatttctgtgctggtggcgcgctcgccgtgccggaaggtgacagtacggtggatgtcgctaaccgcctgattgactggtgccagtcgcgcggtgaagcggttatcgccagtcaggactggcacccggcgaatcacggcagttttgccagtcagcacggtgtagagccttatacgccgggccaactcgacggtttgccacaaaccttctggcccgatcactgtgtgcagaacagtgaaggcgcacaattacatccgttactgaagcaaaaagcgatcgcagcggtgttccataaaggcgaaaatcctttagttgacagttacagtgccttttttgataacggccgtcggcagaaaactgcgctcgatgactggttgcgcgctcatgtaatcaatgaattgatcgttatgggtctggctactgactattgcgttaagtttaccgtgctggacgcgttacagttaggctataaggtgaacgtgattaccgatggttgtcgtggcgtaaatatccagccacaggacagtgcgcacgcgtttatggagatgtcagcagctggggcaacgctatatacgctggcagactgggaagaaacgcaggagtaattttacgctggcctacaattctgtactggcattgtaggccagataaaacacatcagtgatacatctggtaattgacgccatcaacgaaagatttaattcacctcagaaatctcttccagcgacaccttccgcgtttcgatgccaaaaatggagagaaccagcgcacagagcactaacatgacaccaagcaccataaacaccgtgatcgacccataatgtgttaataatgccgcaacgccatagggcgtgaagactgcgacgatccgtccgacggcattaacgaaacccgaaccacgcaggcgtaaatgcgttggccaaagttccgggatataaaccgccgacgcgaagcacacatacatgtataaaaagaagatcatcaccaggccatagattaaaatcgcccactctgtagtctgaattgaatagatatagcctaacacagcaataataataagtaaggcagagccaaataatcgacgaggaaaatgatcaataattaatgccgcaataaatatccctaccggagcgccaatcataataacagcggtcattaatattgatttatcaacatcaatgccggagttaacaaatatggtcggtatccatacggtgatggtataaagcgaaatgttcattgcaattaaaacagtaatcgcgactaatgtacgtcgtaacatttcccctttaaacaggagccagaaggtacccttgattaccttaaccttgctgttgctctggttcaaagtaagcgggggtaaacgaatactcttctctctttcaatttgctgctctacttcacgaagttggctttctgcacctgcgatttgccctttccctgccagccatcgtggcgactcaataaagtatttacctgagagaaaccacgctaacagtatgccaataccgcccagcagaaacattatccgccaactaaaaaaagcgataaccaccacgcctatcgccgcagagagcatgggcgaccagttaccaacaaatgagagccgcgcggaccattttccacgcaccgtcgcggggataaactccgtaaatgaggcatagccaaccataatcagcgcccccattcctgttcccatcaggaagcgaaagaagatgagccagtgcatatcagggacaaaagcggcccctgttgccgcaataccgacgatgagaagatttatgcgaaacgccctgcgccgcccaaagtagtcaccaataaacccaccggtaagagagccgatgaaataaccaaacattaatgccgaggtaaaggcggcattgaggaaattatttgaccatccattgcttaccagctttgctaagacgacattaccggagtaactcaaaaaacccgttaataacagactaaagcttattataccaaatatacgataatgaaaccgggccaaaggcaagcggtccagtcttgcgccaatttgatcatattgttccattgggtgcctcggatttgctaaaaaaggtagcaattgcggcaaattcacttgccgcatctttatcatcattttatttccaggcgcaggaacaaataatattgacaatgtgtgcttaaattaccacaccagctggatattattgtctttgcaaaatgctatccactctgcacccggtgatttatcagttattatgtaattaatatgactaaagtcagctaactggacaaaagctttgcgatcaaacttagagtgatcaaccaataacgcaacttctgtcgcttgacggatcattgtctttttgatttcagcttccgcttcattagagtccagcgcgccgctgttaatatcaagacctttacaactcattaccatgatatcgacatggtagcggctgatgatctctttagtaattcttccttgcagtgaaagtgtatttttgtttagttccccacccgttgaaacgactttaatttctgactgagccagaacatgaatcgcttccgccgagttggttagcaacgtcaggtcactacggtcctgtaacaatttgagcaattccattacggtactactggaatcggctgccatggtggttttattgtcgatgaagggtagtgccttgcgtgcaataagctgcttctcttcataaaacgatgaagcgcgcttataaaaatggatattctccgtcaacatcgctgtatttaaaacagcaccaccataggttctggtcaaaaagccttcatcttccaacttctcaagatcgcggcgaatggtttcttcggttacctgaaaaatcccactcaaatttgagactgtcacctttttatcgttggcaaccatttgcttaattgcctgaatcctgtcttttgccgccacgattacacccctgtatctttttacatcacattagcgcaattatcgcataatcgatgtttactttcaaaataacatgtctgaatcacagattttcatcacagttttcacagaaacagaggtgaatcgtgttgagtatttaacgctctagggcctctgccatttccctcatcaatgttgcgtctgcatccgataagttgatattcagtgccgcgacattttcacgtacctgttccggcgcagtagccccactaagaatggagattaaatcactctgttttaatatccacgccagtgccagagtgggaattgtgcactgataacgagcacagagtggctgccactgttcaagcatatcaatcactttcagcatgttttctcgctggaaccagactttatttgcccgagcgccgcccggaacgtaatcacgcgtgatggtcccggtcaacaatccctgctctagcggagagtagacctgtaccacaatgccattatcacgacatagcggcagcagttcgttttccattgcccggtcgaggatactgtatttcgcctgaataatatccagttcaccatgttgcagatactcgcggatatggtcagcatcgacgttagcagcgcctatagcgcgaattttcccttcggcctttaacgcattaagcactgcgacagtttcagctatcggcgtaaaaaatggcggcaccgactgccagtgcgtcatgtagatatcgatgtaatcaatacccagacgttgcaagctggcttctacctcttcgcggatagattccggagaaaggtttttatacaactgtcgatcgccaactttgttgaataaactcccttttcgttcccagacaatgccgcatttggtttctactacaacctgttcacggggcagtttttttaacgcctgaccaacgataacttcactattgccaaagttatatcctggcgcagtatcaatcaggttaatgccgcaacgatgggcttcaagaatcgtatcaatgcatatttgtcgatcgagatcgccattccatgcaggaccgccgccaatggcccatgtccccaaccccattcgcgaaagcgttatatccgttgtgcctaaaggtatctttttcatttgccttcattatccttcgtattcttccagcaattgttcgaccagctttctgttttttacaccggtggtggcgccgatgcttagaaccgagatagccgccgttgcattggcaaagcgtgcgcattcacgcagatttttaccttctaacagtgctgcaataaaacctgaagcaaagttatcgcccgcaccaatggtgtcgatagcggttattcctgcgaccgccggcaccttcatcgtcatgtcaccacgcttgataaagcagccgtctttacccgttttaatcaccaccgtttttacgccgcacgcaagaaagcagtcagcaatttcatccagtgtctctttcccggtgagtaattttgcctcggcaaaattaggaaacagataatcgacataactcaatgcttcgcaaatatcattcagcgtttcattcaaccgcggtttgatcatatcggcacagataatcatctgccgggctttagcttgcgtaaaaatttctgttagcgctctaccatccaatagaggactgttgaaaatactggccagtgataataatttcgcctgagaaaaccgtgcaaaatcaacatcgtcaatattcaatttccacagactgccgttacggtttgtgacaaaggtccgctcgccatcctccgtcaccagtccaacgttaatagaggtatctatgctgacgtcctgcttcaggctttgaatatcaatattctctttgcggcaatggtcgagaataaattgccctgcggcatctttaccaatacgactcattaatgctgtgcgatggcccagacgagaaataattgttgcttcatttattgcatcccccccggtggtcattgcgattctttcaagaggataagaatccacatcaaagatatttttactgaccggttgcaatggaatatcaacaatagcggcacctatacaaataacgtcgagattatccatattattattccgctttgccatcagaaccgaacagtttaattttatccaatgcccgttcttttacagctttacgcacttcacgttctaaatgcaggaaaggctgatcctggttttctttcactgctaccattgcggcctgacagaggtccgtatgaatgttgattttcgcaatacccaacgaaattgcagttttaatgtcggcatcactgatccctgatgcgccatgcaaaaccagcggaacagaaacagcatcgcgtacgcgtttgacgacctcaaagttcaattgtggctctgacgtataaaccccatgctggttgccgatggcgacagccaatgagtcacagcccgtacgttcaacaaattcagccgcctggtcaggatcggtatagtgatagcccgccagcgcttcctcataaacggtttcattaccaacatgccctaattccgcctctaccggaatacccagcggatggaagaaatcaacagcctctttggttaaacgaatattttcttcgaaatcaaatgcagaagcatcacgcattaatgaattcataccatgagtccaggcgttatgaataatctccatactccgaccatgatcccaatgagttattaccggcaccgttgctttttgtgccattgataccatcatgtgagagaaatcttcaaatgaggtgttgccgacaaaacctgtgccaaaagaaataataaccggtgatttcgcttcttcggctgcgtcgataacgcccatcaacatttctgcattccatacgttaaaatgggcaattgcataatgtttatttgtggcatcgttttcccaatatctgatatctgcgagcatgttctgttctcccgtattaattaatcgctaattttaataacgcctttaataatgtcgcgtttgttgttaactgactcttcaaatgcctgttgtacatcccgataatcgtaaatatgcgtcaccatcgatttcacatcgaatcgccctgaggaaatagcttcaatcgtgaccggataacgattggcatagcggaataccgtctggatagtgacttcgcgattgattttgaggaaattgattgccgaatcgccgggtacagtaccaacaatcataattttaccgccgcgcatgaccagataaggtgcctgtttaacggtgaccgcagaacccgctgtttcaaaaacaatatctgcgcccatgtcttcggtaaattgctgacagcgtgcaatagtgtcttcttttgcgccgttaataaccactgtcgcgccgagctgttccgccattgtcagacgtttttccagcacatcaacgacggcaatttccgttgctcccaggcatttgcacgcttgcaacgtcatcaaaccaatacaacccgctcccagaataattatcttcttaccaggtttaacatctgccagcatcgcggcatgcatcccgactgcggcaggctccaccagcgccccttccatcgtgtccatattgtctggcagtttgtaagtaaagctctccggatgacacagatagtgcgttaatgcgccgcggtagttgggttgtgtcgccataaaatcaacgtccgggcaaatgttatatttgccttccagacagtaacgacagtgaccgcaaggaacgccaggttcgatatttacccgatcccccggtttaaatttgcgcacgcggcttcccacagccacaaccgtcccggcgcattcatgacccaggccaatttcttgatttgggtctttaggaggaataaacgggcctgattcaaaaccatgtacatctgaaccacaaataccgacatattccactttaatcaaaacttcatcttctttaggcacaggtatttctgctgaaataattttcattgtgcccggcacctgcaatattgcttttgaatttttcattttgaatccaccagtattatttattggctactgcatcaatacttaaactttcaacggagacacctttggtttcaattccaatggtggcgatagcaattgcgacaataattgaaacagcccccagaagaataaagactcccgttacgccataactactgagcagcactgcaacggcataaggcgcggcaataccactgattcgccctaccgcattcgccagaccggagccacggagtttggcctctgttggccagatctcagggacatacactgccgaggcatagcaaacgtacatatagacgaaagtaatcaggaagaaaccaatcagcgttatgagcaacatactggtttgcagtgaatagatatatccgagcaccgcaatcaggattaatagccccatccccattgttttacgcggaattttatccatcaccagcatggcaataaaaataccaaatggcgcgccaaacatactcatggtatttaaaacaatcgagtcttttaaattaattccctgggtcatgaatatcgttggcaaccagttaattagtgtgtactgcacaacgttcatggcaatcagcacacaagagcctaatatcacgcgtttcagtaatactcctgtcagtaaggctgaatacggcaccgcttgtggtgctttaccgtcatcagcaataaccacaggcggcaaaggtttacccgtctggcgtatgacgccttcttctatactccgcatgactttctcggcttcctgataacgtccgcgcgattccagccagcgcggggattcaggaaagtagcgccaggccagcgccgtagcgataagtgacaatattgcagggataagcagttgtacccgccagttccactctgcactaatcagcggcgtgagtcccatcgcaatcaatgaacagagcggatatgaccagttaccaataaaggaaacccgactggaccacgttccgcgatttcttccgggcatatattcggtgaaaccagcaaacagtgtaaccagtaaagctcccagcccaacgcccatcacaaaacggcaggcaataaggaaatccatattcggtgagaaagcaccgacaaccatcgaagcaatatgaatggcctcatagaggataaacgcatttctgcgaccggttttgtcaccgatgatgccgcccaccagcgcaccgagaaacattccggcggtcgtgattgctgagaatgtggcagtggtggaattatctgtccagcccaacgctttcagctgcgcgaggatcaagccaccaacggcattactccagcagacaagcaagccaaacgcgacgatggcaaacattgacgaatgccagcggcaatccggtaagcgatccagccgtgcaccacaatgcggttttgttatctgttccatgcgataacgttccttcaggagagtagttattcatcaaagtcgtaagtcatgatcactttgattgcagttttatcgaccatcgcatcaaacccttcgcgccattgcgacaggccgatacgatgcgtgatcatcggtttgactttgatcgcgccgctggctaatagcctgatagcgttacgccatgaggtggagtcataggccatatgcccaatgatgcttttgttccaggcggtaatgtcattaatcgagaaatcaagaggtttgaagcccattccaacgcgtaccacttccccgttcggacggagcatttcgatggcttgtttcagtgcgatattggcaccggagcattcaatcaccagtcccagattgtctttgccacaaatttgctggcagcgcgccaccacatcttcggtagaaccatttactactgccgtcgcacccagttcttttgcaaccgggaagcggaccgccacatcttcttgtagaccaacgacgacgatatttaccgcccccataatccgcgccatttgtacggagaacagcccgagtgggccagtgccgatgacgaccacatcctgaccagggaggaatttcgattgctgcgcgatggatttgtaggcattacagatagggtcaagtacggctgcgtcctcataatcaacaccatcagggatttcccacaacgcatgacgatgaattttgagaatttcaccaggaacaagacaatatttggaaaaaccaccgccccaggtattgttatccagaccaaggtttactttttctgtacaacacagaaaatcaccttgttcacaggccgggcaaacgccgcaaacgtgaccgctgttatccgacacgacgcgttgccccactttccagtctttgactttttcaccaacctgcgcaatacaacctgcgaactcatggccgcggatagagttaaactcatccgaaccgctatcgacattgtagtgcttcatgtctgcgccgcagattgccgcggctttaatttcaatcacgacatcttccgggccacaaatgggttgtgggacatcaatcatcttgtagccgccaaaggccttgccaaaccgagccagtgctttcattgcgtcatcctctgtgttttgttttgcttagatggtcatcatacttacccacatgatttttgaggtcaacattaaatctgtaaaacacagataatgatctgcgttttacaacttagatcacaattacgcagaaaatggctggggctgttacaggttgatggaaggcgggacgcaaaaagagcaaattcgagagggattaccggccaaataggcctgagacttaagttcaggagaagtcattcaggtgagaacgcgactgcaagagatcggactgggacttagccaggtcggggcgagataattgagatgagtcgtggggtcattgttggctatcccctttataaccgcggcaaaaaggggataaaccacttacttaaacatggcaataggctttgctgagataccaaaatcttcttttaactgctgtttgctcttcatgaccatctgaccatttgtgtcaattgtcatatgctgtgcttcggtattatggcgggcttgccacagcatcaccagttgcaggcagttctctttttgttcctcggtcaacgtaacgccatcaggccatttccccagttcaacggcggtcgacaaacgctggtatacttcaggcgtcatgctgttgataatgtcatcaagattcataatttttccgctcctgtggaataagttgctgaatcgttttttcaaccgttgatttcttcgccgttttcgccatcagtgaagcgtaaagaagcagagttaacacaataacgttcgcccgttggctgcggcccgtcagggaagacatggcccagatgggcatcgcagttaccgcaacgaatttctatgcgctgcattccatgtgacaagtctttgatataacgaatagattcttcactcaccggttcgtagaaactgggccagccacagccggaatcatacttggtttgggaatgaaacagcggggcatcgcagatcaaacagtgatatacgccgtcacgcttgttatgcagtaaacgacccgtaaatggcggttctgtcccatgattctgcgtcacgtagaactgcatctcggacaaattttttttcagttcttctgccgaaggtttattagccatttgctcacatctcactttaatcgtgctcacattacgtgactgattctaacaaaacattaacaccaactggcaaaattttgtcctaaacttgatctcgacgaaatggctgcacctaaatcgtgatgaaaatcacatttttatcgtaattgccctttaaaattcggggcgccgaccccatgtggtctcaagcccaaaggaagagtgaggcgaatcagtcgcgtaatgcttaggcacaggattgatttgtcgcaatgattgacacgattccgcttgacgctgcgtaaggtttttgtaattttacaggcaaccttttattcactaacaaatagctggtggaatatatgactatcaaagtaggtatcaacggttttggccgtatcggtcgcattgttttccgtgctgctcagaaacgttctgacatcgagatcgttgcaatcaacgacctgttagacgctgattacatggcatacatgctgaaatatgactccactcacggccgtttcgacggtaccgttgaagtgaaagacggtcatctgatcgttaacggtaaaaaaatccgtgttaccgctgaacgtgatccggctaacctgaaatgggacgaagttggtgttgacgttgtcgctgaagcaactggtctgttcctgactgacgaaactgctcgtaaacacatcaccgctggtgcgaagaaagtggttatgactggtccgtctaaagacaacactccgatgttcgttaaaggcgctaacttcgacaaatatgctggccaggacatcgtttccaacgcatcctgcaccaccaactgcctggctccgctggctaaagttatcaacgataacttcggcatcatcgaaggtctgatgaccaccgttcacgctactaccgctactcagaaaaccgttgatggcccgtctcacaaagactggcgcggcggccgcggcgcttcccagaacatcatcccgtcttctaccggtgctgctaaagctgtaggtaaagtactgccagaactgaatggcaaactgactggtatggcgttccgcgttccgaccccgaacgtatccgtagttgacctgaccgttcgtctggaaaaagctgcaacttacgagcagatcaaagctgccgttaaagctgctgctgaaggcgaaatgaaaggcgttctgggctacaccgaagatgacgtagtatctaccgatttcaacggcgaagtttgcacttccgtgttcgatgctaaagcgggtatcgctctgaacgacaacttcgtgaaactggtatcctggtacgacaacgaaaccggttactccaacaaagttctggacctgatcgctcacatctccaaataagttgagatgactctgtgatctaaaaagagcgacttcggtcgctcttttttttacctgataaaatgaagttaaaggactgcgtcatgattaagaaaatttttgcccttccggtcatcgaacaaatctcccctgtcctctcccgtcgtaaactggatgaactggacctcattgtggtcgatcatccccaggtaaaagcctcttttgcattacagggcgcacaccttctctcgtggaaacctgcgggtgaagaagaagttctgtggttaagtaacaacacaccgttcaaaaatggcgtcgccattcgcggtggcataccgctttgctggccgtggtttggtccggctgcacaacaaggtctgcctgcgcacggttttgcccgcaacctgccgtggacgctgaaatcacatcgtgaagatgctgatggtgtagtgctaacttttgaattgacacaaagcgaagagacgaaaaaattctggccgcacgactttacgctgttagcgcatttccacgtgggtaaaacctgtgaaatcgatcttgaagcacacggcgaatttgaaactacctctgctctgcatacctactttaacgtgggtgatatcgctaaggtaagcgtcagtggactaggcgatcgcttcattgataaagtaaatgacgcgaaagaagatgtactgaccgacggtattcagaccttccctgaccgtaccgatcgcgtgtatctgaatccgcaagattgcagcgtaattaatgacgaagcgctgaatcgtattatcgccgtaggccaccagcatcatctgaacgttgtaggctggaacccaggaccggcgctttcagttagcatgggcgatatgccggatgatggctacaagacctttgtttgtgtagaaacggcttacgcttcagaaacgcaaaaagtcaccaaagagaaacctgcacatctggcgcaatccattcgcgttgcgaaacgttaatttgcgttaatattgtgtgccgggtgcgatgcatccggcacgtatcaacatcacaccatatccagcgcagtttttccttttggtgccggatacgctttatccagcataactaattccgctgacgaaagttcaacctcaagcacagccgcattttgttggacatgtgcgacagttgccgcttttgggatcgccatcacaccctgatggctgattacccacgccaacaatacttgtgccgcactgatattgtgagcatgtgcaatttcgttgactaccgcgttttttaacagtccattgcgcaaccgcccggcctgagctaatggactgtaagccatcaccggcatctgctgtttctggcaccagggaagtagatcgtactcaatccctcgtgaaccgagatggtaaagcacctgattagtggcacactgatttccccccggcagctgccagagttcctgcatatcggcataatcaaggttagaaacgccccagcggcggatttttccctgggcgatcaatttttccatcgctgcgacagtctcttcgagagcgaaactgccagaccagtgtaataagtagagatcgagataatcagtattgagacggcgtaaactggcttcgcatgcatttatcgctttttgcccgccagcattccacggatagactttagagacgagaaagacgttctcacgcagaccgattaatgcttccccaaccactttttcggcaccgccatcggcatacatttcggcggtatcaatgagggttaaaccgagttcaatgcccgcgcgtagtgcagcaacttctgttttacgctgactggcatcttcgcccatataccatgttccctgccctatggctggcagtgagacatcgccactaaattgaatcattttttgttgcattgcttcctcccaggtattgcaccaccgtaatgcaaaacagggcattacgccctgtttttatgcacaaaatgccctggaaaaatgcattatcagaatttgtaggtgatcccggtagaaatcaggccagtccaggatttatccaccattgggctgtcagtaacttcatcagacagacgggtgtagcgcgcgataccgtaaacactccagtcaccgaggaagttgtagctggcgctcagctccaggtaagggctccagctgtcgttcgggttatagccacgcagaccgctgcgagcggactctttgctcgatacgccataatagtattcgttctggttttcgctgttccactgcacaccaatacccggagtcacggtcaggccaccgttggtgtaacgatacaaccaggccatatcccagacgatgccgttgctgttatccagggtatcgccagccagggtggtacgcaggtaaccgtactgggtaaagtgagcataagacagaccagccatcatggtgctcttacggtcatccaggtgacgcatttggtgatcgccactgtctttagctttgaagtaaagcggcgaccagtaagcggtaattgaaagtttgtccgttgcgtcattccacaggtagtaaccaccacctaagccacggaaccagaagttatcgccttcatagttgattaccggtactgggtaaacatcggtatcgtaatctttatatgggtgttcaacgacacctacgcctgcgcccagggaaaatttaccttcagcgtgcgctacgcctgcagacgttgcgataagcactccaagtgccagaagtttgagtttggtcacaattaatcattccttaaacaaatgtttagcgggcgacaaagtttacccgtcaatacatcgaaacccaacctttttacgttttcattttttatagtaactgtttaattttcctgacgcagatgacaccacgcttacagccaaatgaatttagcgttaccggcgaccctattatttacattaattatgcaaaatttatggatgagttgttgatatgccattgaaattaagaaagccgtgcaggcaagttttccatttgccatctacgcttaattttgaaggtgtatcaccgggcacgttgttctcatcgtcaataaaatggcatgagagttgctgtgttttagcaagagacgtcgttcagtttacctcttccgggagcctcaactattcatatgaacggctcttaacctgtgctaaaaaacgaaaggacggcataccatgaatatattcgatcactatcgccagcgatatgaagctgccaaggacgaagagttcacactgcaggagtttcttaccacttgtcggcaagatcgcagtgcttatgccaacgcggctgagcggctattgatggctattggtgagcctgtcatggtcgatacagcccaggaacccagactttctcgactcttttctaaccgggtcattgcacgttatccggcgtttgaagagttttacggcatggaagacgcgattgaacagattgtctcttatctgaaacacgcggctcaggggctggaagagaagaaacaaatcctgtatctgctggggcctgtgggtgggggtaaatcatcgcttgctgagcgactgaaatcattaatgcagctcgtaccgatttatgtattgagcgccaacggtgagcgtagcccggtcaacgatcatcctttctgtcttttcaatccgcaggaagatgcgcagattctggaaaaagagtatggcattcctcgccgttatctcggcaccatcatgtcgccgtgggcggcaaaacgcctgcatgaatttggtggcgatatcactaagttccgggtagtgaaggtctggccgtcaattctgcaacaaattgctatcgccaaaacagaacccggcgatgagaacaaccaggacatctccgccctggtagggaaagtcgatattcgtaaactcgaacactacgcgcagaatgacccggacgcctacggctattccggtgcgctgtgccgcgccaatcaggggatcatggaatttgtcgagatgtttaaagcaccgataaaagtgctgcatcccttgttaaccgccacccaggaaggtaactacaacgggacggaaggtatctccgccctgccgttcaacgggattattctcgcccactcgaacgaatccgaatgggtcactttccgtaataacaaaaacaacgaagccttcctcgaccgtgtttacatcgtgaaggtgccgtattgcttgcgcatttccgaagagatcaaaatctacgagaaattgcttaatcacagtgaattgactcacgccccctgcgcccctggcacgctggaaacgctgtcacgtttttctattctttcgcgtctgaaagagccagaaaactccagcatttattcaaagatgcgggtttatgatggtgaaagtttgaaagacactgatcccaaagccaagtcgtatcaggaatatcgtgactacgccggtgtcgatgaagggatgaacggtctgtcgacgcgttttgcgtttaagatcctctcccgcgtgttcaacttcgatcatgtagaagtggcggcaaacccggtccatctgttctacgtcctggaacagcagatcgagcgcgagcagttcccgcaagagcaggcagaacgctatctggagttcctgaaaggttatctgatcccgaaatatgccgagtttatcggcaaagagatccagacggcctaccttgaatcctattcagaatatgggcagaacatttttgaccgttatgttacctacgcggatttctggattcaggatcaggagtatcgcgatccggataccgggcagttgtttgaccgcgagtctcttaacgccgagctggagaaaatcgagaaaccggcggggatcagtaatccaaaagatttccgcaacgagattgttaacttcgtactgcgagccagagcgaataacagcggacgtaatccgaactggagcagctatgaaaaactgcgcacggttatcgagaagaaaatgttctccaataccgaagagctgttgccggttatttcgtttaacgccaaaacgtcaaccgacgagcagaagaaacacgacgactttgtcgaccgtatgatggaaaaaggctacacccgtaaacaggtgcgtttactgtgcgaatggtatttgcgcgtacgtaaatcgtcttaacaaccctggcccggtacacatgctaccgggcctacagcgacagcgaaccgtgggccagagaagcggcaacacaggcgtagcataccgttggcaaatgtagtacggggggcatatgacctggtttattgaccggcgtctgaacggcaaaaataaaagcatggtgaatcgccagcgtttcttacgccgttataaagcgcaaattaaacagtcgatctccgaggccataaataagcgttcggtgactgacgtcgacagcggcgagtccgtatccattcccacggaagatattagcgaaccgatgtttcatcaggggcgtggaggcctgcgccaccgcgtgcatccgggcaatgaccatttcgtccagaacgaccgaattgagcgtccccagggtggtggcggaggttccggcagtggtcagggccaggccagccaggatggtgaaggtcaggatgaatttgtctttcagatttcgaaagatgagtatcttgatctgctctttgaagatttggccttaccgaatctgaaacaaaaccaacaacgccagctgaccgaatataaaacgcatcgggcgggttataccgctaacggcgttccggccaatatcagcgttgtacgttcattgcagaactcactggcgcggcgcacagccatgacggcgggcaagcggcgggaacttcatgcactggaagagaatttggccatcatcagcaacagtgaacctgcgcaactgctggaagaggaacggctgcgcaaagagattgctgaattgcgcgccaaaattgaacgcgttcctttcattgacactttcgatttacgttacaagaactacgaaaaacggcccgatccctccagccaggcagtgatgttttgcctgatggacgtttccggttcaatggatcagtccactaaagatatggctaaacgtttttatattctgctgtatctgttcctcagcagaacgtataagaacgtggaagtcgtatacatccgccatcatacccaggcgaaagaagtcgatgaacatgagtttttctactcgcaggaaactggcggcaccattgtttccagcgccctaaaactgatggatgaggtagtgaaagagcgttataacccggcacagtggaatatttacgcagcccaagcatcagacggcgataactgggccgatgactctccgctttgccatgaaattctggcgaaaaaaatattacccgttgttcgttattacagctatatcgaaattacacgtcgcgcgcatcagacactgtggcgagaatatgagcatctgcaatctactttcgacaactttgcgatgcagcatatccgcgaccaggatgatatttatccggtgttccgtgaactgtttcataaacaaaatgcaacagctaaagactaaaactgtcagccgggtcattatcgcctggctgatttttagctcactgtaaattatctcttttattacatacattagcttacaatcgctttaaatatgacagcataacctttacacaatttagttccagaaaacaatcattcggaaaaatgattcggtcaacacgtatttccctggggttattctttaattattttttatcgttaacgaaaattgatcctggtcaaaactatatatctctgccatcaataaaatccagcactcacattgctctcctttttatggcttctatgggtacacaaaaattaaaagctcaaggcttttttattttcagcttattgctgacgttaattttattttgcattactaccttatataacgaaaacacgaatgtaaaactcatcccacagatgaattacctgatggttgttgtggctttgtttttccttaacgccgtcattttccttttcatgttaatgaagtatttcactaacaaacaaattttaccaacactcattttaagccttgcatttttaagtggccttatctatttagttgaaaccattgtaattatccataaaccaatcaacggcagtacactgatccagacaaagtcgaatgatgtttctattttctatattttccgccaactcagtttcatttgtttaacctcgctggcgctcttttgttatgggaaagacaacatccttgacaacaataagaagaaaactggcattctgttgctggcgctgattccttttttagtttttccccttctggcacacaatctgagcagttataacgctgactattctttgtatgtcgtcgattactgtccggacaaccatactgcgacctggggaatcaactatacaaaaatattggtttgtttgtgggcatttttactgttctttattatcatgcgtacacgattagccagcgaactatggccgttaatagcattattatgtctggcatcgctatgctgcaacttacttctactgactctggatgagtataattacaccatctggtatatcagtcgcgggattgaagtttccagtaaactgtttgttgtgtcttttctgatttataacatttttcaggaactgcaactctccagcaaactggcagttcatgatgtactgaccaatatttataatcggcgctactttttcaacagcgtagagtcattattgtcgcgacctgttgttaaggacttttgtgtcatgctggttgatattaatcagttcaaacgcatcaatgcccaatggggacatcgtgtgggtgataaagtgctggtatcaattgtcgatattatccagcaaagcatccgccccgatgatattttagcgcgactggagggtgaggtgtttggcttgctatttaccgaactcaatagtgcccaggcaaaaatcattgcggaacgtatgcgtaaaaatgtcgaactcctgaccggctttagtaacagatatgatgttcctgaacaaatgaccatcagtattggcacggttttttcaacgggtgacacgcataatatctcgcttgtcatgacggaagcagataaagccttacgcgaagcgaaaagcgaggggggcaacaaagtgattattcatcatatttaagtgcaaaaatattcagagccatgctttttgcgtggcttttgcatacaatttattactattacccctaaatttcccctccccagcggcgcagagatgagtataattagcgcccctgtgccaggccgcaatcgaactttatctggttttctcgtttcactaaccgaaggagtgccatttatcatgaaattgcaccatagaatgctccggcattttatcgccgcaagtgtcattgtgctgacatcttccttccttatttttgaacttgtcgccagcgacagagcaatgagtgcctatctgcgctatatcgtgcagagagcagactcttcctttctttatgataagtatcagaatcagagtattgccgcgcatgtgatgcgcgctctcgctgctgagcagtcggaagtgccgccagaacagcggcgcgccatctgcgaggcttttgagtctgccaataatacccatggcttaaacctgactgcccataaatacccgggcttacgcggcacactacaaaccgcatccactgactgcgacacaattgtggaagctgcagcactattacccgcttttgatcaggcagtggaaggcaaccgccaccaggatgattacggttcaggtcttgggatggccgaagagaaatttcactattatctcgatctcaatgaccgctatgtctatttttatgagccggttaatgttgaatactttgcgatgaataactggtccttcctgcagtcaggaagtattggtatcgatcgcaaagatattgaaaaagtatttaccgggcgtaccgtattatcgagcatttaccaggatcagcgtactaaacagaacgtgatgagtttgctgacgccggtatatgtcgcagggcagctaaaagggattgtgctgctggatattaacaaaaacaatctgcggaatatcttttacactcatgaccgccctctcctctggcgttttctcaatgtcacgctaaccgatacagattcggggcgcgacattatcatcaaccagagcgaagataatctgttccagtatgtcagttacgtccatgacttaccgggcggcattcgtgtctcgttatccattgatattctttactttatcacgtcttcgtggaaaagcgttctgttctggattttgacggcgttaattttgctgaatatggtgcggatgcacttccgcttataccaaaatgtgtcgcgagaaaatattagtgatgcgatgactggactctataatcgcaaaattttaacccctgaactggagcagcggttgcagaaactggtgcaatccggttcttcggtgatgtttattgctattgacatggacaagttaaagcaaataaatgacaccctcggtcatcaggagggggatttagcgattacgttattagctcaggcgattaaacaatcgattcgtaaaagtgattatgccatccgactcggtggcgatgaattctgcatcattcttgtcgattcgacgccgcaaattgcagcacaactgcctgaacgtatcgaaaaacgtctgcaacatatcgcgccgcagaaagaaatcggcttctcttccggtatttacgcgatgaaagaaaacgatacgttacatgatgcgtataaagcttccgatgagcgtttatatgtcaataagcagaacaaaaacagccgttcatgataaccttctgtagttgtttgcttgtaatctcaggagcatgaaatgactgaaatggctaaagaaagcgtgacgcatcagcggttaatcgctttattatcacaagaaggtgctaacttccgcgtcgttacccatgaagcggtaggtaaatgtgaagcggtgtcagaaattcgtggcaccgctttaggccagggggctaaggcactggtatgtaaagtcaaaggcaatggcgtaaatcaacatgttctggcgatcctcgctgccgatcaacaggccgatctgagccaactcgccagccatataggcggattacgcgcttcgttggccagcccggcggaagtcgatgaactcacaggctgtgtcttcggcgcgatcccccctttcagcttccatccaaaactcaaactggttgccgaccccctactcttcgaacgatttgatgaaatcgccttcaatgcaggcatgctggataaatccgttattttgaaaaccgcggattatttgcgtattgcgcaaccagaactggtcaatttccgccgcactgcgtaactagcctgtccgttcaataagcagaacggacaaaaccagcacagcagcaatggcaaaaaacgatgacgtgataatcagtgtctcgacgaacatttgatcgttcatagtatgcccccgggagatagctgttttcacgttattgttagcgtgcacaaatggcagtttgatgacagttcgcctgattttttatgcagaaaacgtaaagattttctacttcctgcctgcagcaagcgtaaagtaagcaggcttattattttttggcaaggaaaccacgatgtttgatgtcactttgctgatcctgctcgggttagctgcgctgggctttatcagtcataacaccactgtcgccgtttcaattctggtgttaatcattgtccgcgtcacaccgttaagcacctttttcccgtggattgaaaaacaggggctaagtatcgggataatcattctgacgattggcgttatggcccccatcgccagcgggacgctaccgccctcaaccctgattcactcgtttctgaactggaaatcgctggtggcaattgcagtcggcgttattgtctcctggctgggtgggcgcggcgtgacgttaatgggcagccagccgcaactggtcgccgggctgctggtaggtactgttttaggcgtggcgctgtttcgcggcgtaccggtcggcccgcttattgccgcgggtctggtttcgctgattgtggggaaacagtagttaatcccgcaatatatcggcctggcgtttgtcccaggcctttcttaaacattgtaataaaggccgttgttgaatcataccccagcgtatgagcaactttctgtacagtatcgcctttcactaatccctgaagcgccataatcagctgtaactgctgacgccactggcgaaaactcaaccccgtctctttcactatcagccgggcaagattgcgttcactcatcgcaaaaaagccagcccattgccccaatgagccccactcgacgggctctttcgccatcatctccaccattgtgcggattttaggatgagaagaaacgggcaggtgcagctgttgttgtggctgctgagggagttcatcaaacaggacctgaattaatctgcgggtcatcggctcagcacgctgagtcgtcgtcctgtttgccagggttaaaattaattcccggcataagggcgatattttcaatgtgcaacatgttgtcggcattgtcactgcgctgggctcgataaacagaaaacagagttcagcgttagctgtcacttgattgctatgtttcaccccgcccggtatccaaaccgcatattgtggcggcaccatccacaaagcattttccaccgtacaggtaattgcaccatgtagtgccagtatcaactgccctttgcggtgctgatgtacaggactggttaactcatccgttccggcgtgaatacaaaatgcgaccgcggcttcatggtgtcggtcgggttcatagccattgagattcaacctgtgcatcattttgtccgaatttagcgatattttgtcattttagcttgattcaacataacaataaaaacggtaaggtacagcctcgtttgtaacaatgagaagcatatgacctgttcaacttcattaagcggcaaaaacaggattgtccttatcgctggcattctgatgattgccacaacattacgcgtcacctttaccggcgcagcaccgttactggatacgattcgttccgcttactcgctaacgacggcgcaaaccggcttattgaccaccctgccattattagcctttgcgctgatctcaccgctggccgccccggtggcgcgacgttttggtgtggaacgtagcctgtttgccgcgttacttttgatctgtgcaggtatcgcaattcgctctctcccttcgccttacttattatttggcggtacagcggtcattggcggtgggattgcattaggcaatgtcttactgccaggattaattaaacgcgatttccctcattccgtcgccagacttaccggcgcatattccctgacaatgggagctgcggcggcactgggatcggcgatggtagtgccgctggctttgaacggttttggctggcaaggcgcgttgctcatgctgatgtgttttcctctgctggctctttttttatggctgccacagtggcgaagtcaacaacatgcaaatttgagtacctcacgcgccttacatactcggggtatcttgcgttcgccgcttgcctggcaggtaacattgtttcttgggatcaactcactggtctattacgtgattattggctggcttccggcgattctcatcagtcacggctatagcgaagcacaggcgggttcactgcatggtttgctgcaactagccacagcagctcccggtttgctgatcccacttttcttacatcatatgaaagatcagcgtggtattgcagcgttcgttgccttgatgtgcgcagtgggcgcggttgggctctgctttatgccagcacacgcgatcacctggactctgcttttcggttttggttccggcgcaacaatgatactggggttgacgttcattggtctgcgggcaagttctgcgcatcaggcggcggcactctcggggatggcacaatccgtcgggtatttgctggcagcctgtgggccgccgctgatgggtaaaatacacgatgctaacggtgactggtccgtaccactgctgggtgttgcaatactttcactactgatggcgattttcggactttgcgccgggagagacaaagaaattcgctaatatccggtgctatagtgacgtgacaaatcatgcgtgaaagggagaacaaatacgatgaatattcagtgcaaacgcgtttatgatccggctgaacagagcgatggttatcgcgtactggtcgaccgcctctggccacgcggtatcaaaaaaaccgatttagcccttgatgaatgggataaagaaatcacgccgtcaacggagctgcgcaaagcctttcacggcgaagtcgtcgattttgcaacctttcgcgagcaatatcttgcagaactggcgcaacacgagcaagaaggaaagcggctggcagacatcgccaaaaaacagccgctgaccctgctctactcagcaaaaaacaccacgcagaaccatgcgctggtgctggcagactggctacgtagcttgtgattttagtacagcatccggcggttatttttcaccagccggatggtcccgtcgccacaatgcccattcatcaatcgtttcaccgcccggtaatttgcaattgttgctgaccccttgcgctgtctgcacaggaatgagcgtcccgcccttctgctggcaatagaccgacgccggatttgccataccaatctgcggcggtttaggtgcttctggctgagaaggggttgaacaaccagccaggaccagcaagcaaggcagaacaaaactgataattttcatttattgatctcacatatttatccaggcttagagtatcgctgtatcgttttgttttgcagcactatttttattacattcactcaaaacatattacgccttgtttcatctttgttgatgatgttttatcatgcctgcaaagattaaattatcagcatttacccgccgtatcctggagttgtttcgtgtcagatcagattatcgcccgcgtctcgcaatcccttgccaaagaacagtcactggaaagtctggttcgacagcttctggagatgctggaaatggtcactgatatggagtcaacctacctgaccaaagtggatgtcgaagcgcgcctgcagcatataatgtttgcccgtaatagccagaaaatgcacatcccggagaattttaccgtctcgtgggattactcgttatgcaaacgcgccattgatgaaaactgctttttcagcgatgaagtccctgaccgttggggcgactgtattgcggcacgcaatcttggcatcaccacatttctgagcacgccaattcacttaccggatggatcattctatggcacgctttgcgccgccagcagtgagaagcgccagtggagtgaacgcgcggaacaggtcttacagttattcgccggactgattgcacaatatattcaaaaagaggcactggttgaacagctgcgcgaagctaatgctgcgctgattgcgcaatcgtataccgactcgttaaccgggctaccgaatcggcgggcgatttttgaaaatctgacgacgctgttttctctcgcccggcatcttaaccataagataatgatcgcgtttatcgatctggataacttcaaattaatcaatgatcgttttggtcataatagtggcgatctgtttctcattcaggttggcgagcgccttaatacgctccagcaaaatggcgaagttattggtcgtctcggcggtgatgagtttttggttgtttcactgaacaacgagaatgcggatatttcgtcgctgcgagaacgtattcaacaacaaatacgcggagaatatcacttaggtgatgttgatttgtattatcctggtgccagtcttggcatagtagaagtcgatcctgaaacgaccgatgcagacagtgccctgcatgctgccgatatcgcgatgtatcaggagaaaaaacataaacagaaaacaccttttgtcacgcattcagcgctacattcctgaggcgtattcacatccttttgattggtgataacatgcgaatcggtattatttttccggttgtaatctttattacagcggtcgtatttttagcatggttttttattggcggctatgctgccccgggagcataaagatgaaaaaaacaacgattattatgatgggtgtggcgattattgtcgtactcggcactgagctgggatggtggtaacgtcacatctaaaaaaatagcaaaggctgcctgtgtgcagcctttgtgcaatttacgcgttaacttttaatcttcctgtagataaatagcacaacaatcgcaccaataacggcaaccacgaagctgccaaaattgaagccatcgactttaccaaagccaaacagcgtgctgatccatccgccgactacggcaccgactatccccagcaggatagtcataaagaatccaccaccatctttacctggcatgatccacttcgccagaataccggcaataagcccaaaaataatccatgacagaatgcccattgtttcctcacttatctgttttgcattagcgggttagtcgctgataaaaagcatagcacaacatcgggagggtaagatttgtgacgagcatcacggaggaattttttgcgatggcgcagaaattgcgccatcaacgatcagtgataattaccaaccacaaacatcatgttcgttttccgtgtcataagaacgcacggtattcaccagatcttttatcacttcagccgccacttctggcaccagcaaagtcatcggcgtctctgtttcataatcgacagaaacgccattgctgttattggtgacggtcacggtatacgttgctttgcccatgattcatttcccgttatgaatgactttccgttgttgcgtgccttccatcaggacttcaggagcaacgaagaagtcaatgttgaaataagtatcgtcagtcatggcttcaatgttgtgccacttttctggagggaacaccgcaaactgccccgcttcgataaggatcacctgatcaggctctgcactgtgttcatcagcgtagccgagatatttgaccgccccatgcataacggaaaggcgtgggtaaacccccgggcgcgttcctttatcaagatgacgttcgaatattccggcaggcgcagtttgtttattccagaaaggcgttgagcgcgtatgaatataattctgtgggatttgcagcatccttttccctccttcggtgaatgcgctgaaaacggtttattccagccgtttcagggtacgcctgataatttgcattttaaataccatttattggttactttttagcaccggatcagagaagaatcagggaggattacaggtgggaagcccgcggcaacgcgggctgaaagcatcaggattgcagcgtcgccagtcgggcggcgaaacccacgaacatcaaaccaatcagtgagttgcccactttagccagtttctttttggtacgtatgtactgcgtgacaaaagccccagaaataatcaggaagctcaaatagcagaaactcaccagttccagcgtcgtcgccagaataaagaatgaaattcccgtatgtggggcattaacatcgataaactgtacgaaaaacgacacatagaacaaaatggctttcggattagtcaggctcaaaattaacgcgcgtttaaaaatggcaccgtattggggctcatcggatttggtctcgctatttttacctttcagggtcgcgtagagaattttactccccagatagagcaaataaaacgcaccaagataacgtacgatgttgaataatatcggggtggtcttaattaatgtcgccactccagcccatgccagaaacatcaataccgcatcgccaataaatacaccacaggccgcaagataaccgcctttcataccgctactgacgctatttttgagtacaaacagggtatttggccctggcaccaacacaataaaaatggccccaaccagataggtccagtaattcagaaccccgtattcagcgaacacattaacctctttaattatctttcgatcatgcgcgattaaaggtgaatatgctaaccaatctgtagcggcttagaaaggagaaaatcaggttttaacccgatatcaacccgataattgaatcattaatcaggcctgctccagtgaaaaattcgggtagtgctcggcaaaatactggcgtaaaaattctaccgttatccgcactttcgctgacgtcgacagctttgaaacataaacggcccagacattcgctggctggtaatattccggtagcacttgtactaaatgaccactggcgggaaacagcctggcgacatcgatttttacgtggtccggaaaaacaccgaaggcgaatattcctcgccaggcggtagagtaaatgaaggaacagagaatgaagtcgtcattcaggaatcggtatttactcgtcgtggtgtcgagcgcattttgcgttaagctcaaataagttcatttgaaccgcctgctgttggatttgtagtttgccgaagccggactgagcgcgcccagtccggcttcggaagattttactgtggatattcctgcaataaattgtgtaatgcttccgccatcagctcaccacgccagccggaaatcagctccggcaaattgttctgcggtttcagtttccagtgccagttcagcaattggttgatttgccgacgcgatgccagcaattcggcgctgatcttgtgcgtttcgctgacgtcagtaatcagcgacttaatcgctttaaacgctttacgataacccggcatgtccatcaggttaagcatcggctgcggtaaggcctcttccggcaatgcctgcgctttttccaccagcgccagcaacgttttaccgtggaagcggatttcgctaccggataagcccaggctgtccagttcgcccagacttcccggcatataacgcgctaccgaccacaaatgctcttcacgcacgacaaagttcaccgccagatcgcgctctcgcgccttgcgcaatcgccagtcggctaacagttgcagacaggccagttggcgtgtgcgtaattgccaggcattggtgatatcacgccaggcgtcttccggcgcaacgacttcctgacgacgcatttgcatcaggcggcattcatccagcgccgcaggtagccagccggaggcctccgtttctaccataagctttgcggtgatcggtaacagataccagacatccgccgctgcgtattcacactgacgttcggtcagcggtctggccagccagtcggtgcgcgattcactcttgtccagcgtaacgccggaatactcttccaccatggaagcgaaaccccatgacatcgggcgtccgcagaaggcagcaaggatttgcgtgtcaatcaagggttgtggtaattcgccaaagacattgaggaacacttccagatcttcactgcctgcatgaagaaattttgtgatggacggatcgcgcaggatcgctttcagcggtgaccagtcggtgatcccgagaggatcaattagcgccagatgctcaccatcaaaaagttgaattaaacccagctgcgggtaataagtgcgcgtacgaacaaattcagtatccagggctatcgccggaaaggcacggacggcttcacacaaagaagccagcgcatcgtccgtggtaatcatttggtaattcaaattgtattctctttagtgggcgtcaaaaaaaacgccggattaaccggcgtctgacgactgacttaacgctcaggctttattgtccactttgccgcgcgcttcgtcacgtaattctcgtcgcaaaatttttccgacgttagatttcggtaactcatcacgaaactccaccagcttcggtactttgtagcccgtgagctgacggcggcaaaaggtcaccagtgactcttcggtaagcgatggatcttttttcactacgaagattttcaccgcttcaccactggagccggaaggtacgccaacagccgcgacttcctgtacgccaggatgctgcatgacgacatcttcaatctcgttgggataaacgttaaaaccggaaaccagaatcatgtcttttttacgatcgacaatgcgcaggaatccttcttcatccatcaccgcgatgtcgccggtgtgtaaccagccatttttgatgatttcatcggtagcatccggacgctgccagtaacccagcatcacctgcggtcctttgacacaaagctcacctggttgaccaggtggtacttcattatcatcatcatccaccagtttggcttccgtcgacggcaccggtaaaccgatgctaccactatgataatcaatatcatacgggttaacgctgaccagcggcgcgcactcggtcaggccataaccttccagcagatactgtccagtcagtttaacccaacgttctgcaaccacttgctgaacaggcatcccaccgcctgcggaaagatgcagactggagaaatccagctgctggaactctttattgttcagcaacgcattgaacaaggtgttaacgccagtgatagcggtaaacggatatttcgctaactcttttaccagccctggaatatcgcgcgggttagtgataagcaggttctgcccccccagttcgataaacagcaggcagttaatggtcagtgcaaaaatgtgatacagcggcagcgccgtcaccaccagctctttgcccggatgcaacagcggaccataggtcgcgttaacctgttccaggttcgccagcatattgcggtgagtcagcatcgcgcctttcgccacaccagtggtgccgccggtgtattgcaggaaagctaaatcttccggcaccagttctggtttgacgtactgcatccggtagccgttgtgcagggcgctacgaaatgaaatggcatctggcagatggtatttcggcaccagacgcttgatgtatttaacaacgaaattgactaccgtgccttttgccgtagatagctgatcgcccatacgggtcagaataacgtgctgaacggcggttttatcaaccactttttccagagtgtgggcaaagttagacacgataacaatcgccgatgcgccgctatcgttaagctgatgctcaagctcacgcggggtatacaacgggttaacgtttacgacgatcatcccggcacgcaaaatgccaaacagcgccaccggatattgcaataagttaggcatcatcaacgcaacgcgatcgcctttcttcagccccaacccttgttgcaaataagcggcaaacgcgcgactgcgttcttccagtttgcggaaggtcatcacctcccccatattcacaaacgcgggttgatcggcgtagcgcgcgaccgactgctcaaacatatctaccagagattgataacggtcagggttgatctccgtcggaacgtccgcgggataacggttaagccaaaccttcttcaattcttcacctctaaaatgcgcgttcgtcgtcatcgcaaccccaagtgataaacatactgttaacataatattaactcatcttaccagcttgataattacccaaggaaaaggttgcgaagcgcgtcactatttatttttatctttaccgtaagaatgcagaaacagcggaccggccgctgtttctttttctttaaaaacaagcaattattcagttacaactgtttgtactctcgcggggccgggattataccagccccatccgccgtagccatagggccagccacgaccgccataaaaccatggatcaatcggctgaggcggcataatcacctgctgggttaaatgccaacgtttgtaacccgttacttgcatcaccataaatttatagggcgtattaccgattttgccgtcaaccgcaccggtgattggcccgactaccgtcaccagttgtccgcggaaatccaccgggtccagaaaaccgttcacatcggcataaatgcgaccgcgagaaggttctcccagcgtcggtctggctccgctgtccagtggtacggtggcaatttccaggcgtgttttcccttgctggttttgtaccgcaaccactttgccgccaaagcgagcctcctgaccaacgtacagctgcggcgcactcatcacccgaactaaatcttgttgcggcgtgggactgctgcctttaatggcgtctggcacagtaacacaaccgctcagcattagcgcaaacgtacctgccagtatgcctttgataacattcttttgaaccgccatgatgcgactcctttttttctcagggcatactcttaagattcattctttgcccggaagtttcttccatgcgacgttgttacgtaaataaactggttcagcatgttccaccgccaccgttttaccctcggcaaacatctggcacgcaatcggcagcatatcttctgcagcgggcagtaacacttcgccatcgagcaaaaccagcccgctctctttaccgagatccggccaggcttgccagcccgtccctactgtcacccattcgccggaaagctgttgcattcgttcatgaacgagttcgggtttgagtacggcttcggtttcttcaccgtgccagataccgttttcatcacgctgatattcggcccagtaaacttcgcccattcgcgcgtcaatagctgccagcacgcgggttgcgccgtttttgcgccacgccccttgcgccatcgtcattagcgtggagacgccaatcatcggcagctctgcgccaagtgccagcccttgcgcaatgccaataccaatgcgcacgccggtgaagctaccggggccgcgcccgtaagccagagcgtttatgtcagtcagggaagttccgctggtggtcaggatatcctgcaccatcggtaagattcgttgagtatgttcacgagggcaaagctcaaaatgagcgttgacagtaccgtcgttccacagggcgacagagcaggcctctgtcgcggtatcgatagccagaattcgcatgggtcttcgtgcttagatcaataaaaaggcgcgcatcataccatactccgtaacaaattacctggaggatggtatcgcaaggaaacgaaccgcacgggcaatgtcacgggtgcgcggcgctggcggcagactggcgagaaacgtcgcgccgtaagggcgcatcaccagccgattatcgcaaatcaccagcacgccgcgatcgtcggcgtcgcgaatcaatcgccctaccccctgcttgagagtaatgaccgcatccggcagttgtacttcatcgaacggatcaccaccgcgcaaacggcaatcttccatgcgtgcttttaatagtggatcatccggcgaggtaaacggcaatttgtcgataatcaccaatgacaatgtatcgccacgcacgtccaccccttcccagaaactgctggttgccacaagaagcgcgttaccggcgctgacaaattgctgcaacagttgccctttgctggtttccccctgcaacaaaacgggaagcgtcatggtagcgcggaactgctcggccagatcgcgcatcatggcgtgcgaggtacaaagcataaaacaacgaccgttgttagcttcgatgatcggtcgcagcattgccgccagttgccgtgcggaacccggttgattggtttgcggcaggttgcgcggcacacagagtaacgcctggcggctgtaatcgaaggggctgggtaacagcaacgactctgcctgttcaatgccaagccgcgaggtgaaatgatgcagatcgtcgttcaccgacagcgttgctgaggtaaagatccagctaccgggtttttgcgccattaactctttgaatttatccgccacgctgagcggcgtgagagccagagtaaaatggcgcgaagtgcattcgtaccagtagctgtaacccggctgattaatctcttttagccgtttgagtcgcgtgcgatataacgtggcgcgttcaaatgccgcatccagcaaggcggaacgccccagcgaaagtttcgccacgtcataacaaagttccagggtgtcatcgagcagtaaaaatgcccgctgaatttgcggattagctaacagctcacgcaggttaccgcgataacctggctcaccgagttgcaggcgaaaatcctgcgcactctgggcaagacggtccgcgcacttttgtaactgctgggtgtcttttaattcggtgcggtaggcgatggtgatgtcttttgccaggtcgagcagttgtcgactggagagtgactgaccaaaatactggctggcaatgtcgggcagctggtgggcttcgtcgaagatcatgacgtccgcttccgggatcaattcgccaaaaccgctctctttcaccaccatatccgccagaaacagatgatgattcaccaccaccacatcggcgtccatcgcttttttgcgtgctttgaccacaaagcaatctttatacatcgggcagtcactgccgaggcagttatcgttggtgctggtgaccagcggccacgcctgtgaatcttccgccacgctgacgcaggtgctgatatcgccatcgactgtttgattagaccaggagcgcagcaggatcacatcgcttaagatttgtaccggcagatcgccccccgccagcgcctgctgttcgagacgttcgaggcagaggtagtttgagcgccctttcagcagcgccacattgcccgtgtatttcaatgcctttgagaccgttggcaaatcgcggctgtagagctgatcctgcaacgcttttgagccggtcgagattatgactttctttttcgcccgcagcgcaggggccaggtaagcgtaggttttgcccgtaccggttcctgcttccaccaccagcggctggcctttttctatcgcctgggtgacggctaccgccatctgtcgctgtggctctcgcggcttaaagccgggtatcgctttcgctaactgaccgtctggtgcaaaatcgtccgtcacactaccccctgttgatttgaacagggattatgtcaggatgagggcgctttcgccagttgaagtggtgacggcgacttcacattgtggcagtctttgcagcacgaaaatggaagtataatgaggacaaaatgatgactatcgttcgtatcgatgccgaagcccgctggtctgatgtggtaatccacaacaacacgctctactacactggtgtaccggaaaacctcgacgccgatgcctttgagcaaaccgccaacacgctggcgcagattgacgccgtgctggaaaaacagggcagcaataaatcgagcattctggatgccaccattttcctggccgataaaaacgacttcgcggcgatgaataaagcgtgggatgcctgggttgtcgcgggtcatgcgccggtgcgctgcacggtacaagcaggtttgatgaacccgaagtataaagttgaaattaagattgtggctgcggtgtaagctttatcgaagcaaaataagtcagacgataatttatcgacaatactggtcggttttgcataaatcgaccagagattaagatattacagttgatgctcctgctaattcattatttatttttataatttcaattttatctataaaactaactatataaataaacataatcatgccgttatgttcgcccttcgattagcatctctggttttctttcttacctgaacaatctggttatagcgtgaggactgaccattaattttctccatcttactggataacacaccatgagctgctacctttaaaacacctgaatgtcaacaggttaactcgtgccatatcgttataatccctttgatattagatgcaaattaaggtcatatatagccttatcgataacatggttaattttaaggataagaatatgcctgctgtaatagataaagccctggatttcattggtgccatggatgtatcagcaccaacaccaagttcgatgaatgaaagtacggcgaagggaatctttaaatatttaaaagaactgggagtacccgcgagtgccgctgatattacgacgcgagctgacctggaaggctggaacccggggttcacggaaaaaatggttggatgggcaaaaaaaatggagtctggtgaacgcattgtgattaaaaatcctgaatacttttcaacatatatgcaggaagaactaaaagcactggtctaagttaaatttacatcagcataaatgggtcaggacgcttttaatcacatatgaaaagcgtcctttttctcacaatcaaataaccatcggcttctataacgaaagcgatacggataagtgtgttactcgtcttcatcctcaaaacgcgccacgattcgctcgccggaatggttggcacgcagctcttctgccaccagcgcgattgcctggccgctgctcatcccttgagccatcagttcctggatccgctcgacggctttttgctgctgttcatgggtgagtgaaggtaaacctgcaaacattgttaactcctgctaaattgttggcgctaattatttcatgctacccggcacatagccagtagagtcaggactgatgaagacgttatctcccgctgtgattactttaccctggcgtcaggacgccgctgaattttatttctcccgcttaagccacctgccgtgggcgatgcttttacactccggctatgccgatcatccatatagccgctttgatattgtggtcgccgagccgatttgcactttaaccactttcggtaaagaaaccgttgttagtgaaagcgaaaaacgcacaacgaccactgatgacccgctacaggtgctccagcaggtgctggatcgcgcagacattcgcccagcgcataacgaagatttgccatttcagggcggcgcgctggggttgtttggctacgatctgggccgccgttttgagtcactgccagaaattgcacagcaagatatcgttctgccggatatggctgtgggtatctacgactgggcgctggttgttgaccaccagcgtcaaacagtttctttgctgagtcataatgatgtcaatgctcgtcgggcctggctggaaagccagcaattctcgccgcaggaagatttcacgctcacttccgactggcaatccaatatgacccgcgagcagtacggcgaaaaatttcgccaggtacaggaatatctgcacagcggtgattgctatcaggtgaatctcgcccagcgttttcatgcgacctattctggcgatgaatggcaggcattccttcagcttaatcaggccaaccgcgcgccatttagcgcttttttacgtcttgaacagagtgcaattttaagcctttcgccagagcggtttattctttgtgataatagtgaaatccagacccgcccgattaaaggcacgctaccacgcctgcccgatcctcaggaagatagcaaacaagcagaaaaactggcgaactcagcgaaagatcgtgccgaaaatctgatgattgtcgatttaatgcgtaatgatatcggtcgtgttgccgtagcaggttcggtaaaagtaccagagctgttcgtggtggaacccttccctgccgtgcatcatctggtcagcaccataacggcgcaactaccagaacagttacacgccagcgatctgctgcgcgcggcttttcctggtggctcaataaccggggctccgaaagtacgggctatggaaattatcgacgaactggaaccgcagcgacgcaatgcctggtgcggcagcattggctatttgagcttttgcggcaacatggacaccagcattactatccgcacgctgactgccattaacggacaaatttactgctctgcggggggtggaattgtcgccgatagccaggaagaagcggaatatcaggaaacttttgataaagttaataagatattacgccaactggagaagtaagacgtggaataccgtagcctgacgcttgatgattttttatcgcgctttcaacttttgcgcccgcaaattaaccgggaaaccctaaatcatcgtcaggctgccgtgttaatccccatcgtccgtcgaccgcaaccggggttgttgctgactcagcgttcgattcatctgcgtaaacacgccggacaagtggcattccctggaggtgcagtcgatgacacggacacatccgttatcgccgccgcgctgcgcgaagctgaagaagaggtcgctataccgccttctgccgttgaagttattggcgtgctgccgcccgtcgatagcgtaactggctaccaggtaaccccggtggtcggcattatcccgcccgatctgccgtatcgcgccagtgaagatgaagtctcggcggtctttgaaatgccgctcgcccaggcattacatctgggtcgttatcaccctttagatatctaccgccgtggcgattcacatcgggtatggctgtcctggtacgaacagtattttgtatggggaatgaccgcaggcataattcgtgagctggcgctgcaaattggtgtgaaaccctgactatacttatctttacatctacaaaacactacttgagacaatcatcgcaatattagttaaatcgcggtttttgattagtttaattcatgtgaatagttaagcctgtcgccgcgttccctcttacactatgcgctgttattagttcgttactggaagtccagtcaccttgtcaggagtattatcgtgattagtctattcgacatgtttaaggtggggattggtccctcatcttcccataccgtagggcctatgaaggcgggtaaacagttcgtcgatgatctggtcgaaaaaggcttactggatagcgttactcgcgttgccgtggacgtttatggttcactgtcgctgacgggtaaaggccaccacaccgatatcgccattattatgggtcttgcaggtaacgaacctgccaccgtggatatcgacagtattcccggttttattcgcgacgtagaagagcgcgaacgtctgctgctggcacagggacggcatgaagtggatttcccgcgcgacaacgggatgcgttttcataacggtaacctgccgctgcatgaaaacggtatgcaaatccacgcctataacggcgatgaagtcgtctacagcaaaacttattattccatcggcggcggttttatcgtcgatgaagaacactttggtcaggatgctgccaacgaagtgagcgtgccgtatccgttcaaatctgccaccgaactgctcgcgtactgtaatgaaaccggcttttcgctgtctggtctcgctatgcaaaacgaactggcgctgcacagcaagaaagagatcgacgagtatttcgcgcatgtctggcaaaccatgcaggcatgtatcgatcgcgggatgaataccgaaggcgtactgccaggcccgttgcgcgtgccacgtcgtgcgtcggccctgcgccggatgctggtttccagcgataaactgtctaacgatccgatgaatgtcattgactgggtaaacatgtttgcgctggcagttaacgaagaaaacgccgccggtggccgtgtggtaactgcgccaactaacggtgcctgcggtatcgttccggcagtgctggcttactatgaccactttattgaatcagttagcccggacatctatacccgttactttatggcagcgggcgcgattggtgcactgtataaaatgaacgcgtctatttccggtgcggaagtcggttgccagggcgaagtaggtgttgcctgttcaatggctgctgcgggccttgccgagctgttgggcggtagcccggaacaggtttgtgtggcagcggaaattggcatggagcacaacctcggtctgacctgcgaccccgttgcagggcaagttcaggtgccgtgcattgaacgtaatgccattgcctctgtgaaggcgattaacgccgcacggatggctctgcgccgcaccagtgcaccgcgcgtctcgctggataaggtcatcgaaacgatgtacgaaaccggtaaggacatgaacgctaaataccgcgaaacctcacgcggtggtctggcaatcaaagtccagtgtgactaatacttcttactcgcccatctgcaacggatgggcgaatttattcccgctttctcgtctgctgtaattttccccactacacttccactgttgcgtcaggcgtttgtcgccatacgcttacagggtggcccgcatgcaaaaagcacaacggatcattaaaacctatcgccgtaatcgaatgattgtttgtacgatttgcgcactcgttacgctcgcttcgaccctgagcgtgcgatttatttcacagcgtaacttaaatcaacaacgggtagtacaattcgccaatcacgctgtagaggaattagataaagtactgcttcccctacaggcaggtagcgaagtcttgcttccgctgattggtctgccctgctctgtcacccatttgccattacgtaaacaggctgcaaaactccaaactgtgcgatccattggcctggtgcaagacggcacactttattgctccagcatttttggttatcgcaatgtgcccgtcgtggacattctggctgaacttcctgcaccgcaaccacttttacgactgacgaccgaccgtgccctgataaaaggcagtccggttttgattcaatggacgcctgcagcgggcagtagcaatgctggggtcatggagatgattaacatcgacttactgacggcaatgctccttgaaccacaactgccgcaaatcagtagcgccagcctgacggtggacagtcggcatttgctctatggtaatgggctggtagattcccttccgcaacctgaaaataatgaaaactatcaggtttcttcgcaacgctttccttttaccattaacgttaatggcccgggggctacggcgctggcatggcactatcttccaacacaattaccgctggcggtactgctaagtttactggtgggctacatcgcctggctggcgaccgcttaccgaatgagcttttcccgcgagatcaatctgggcctggcgcaacatgagttcgaattgttctgtcagcctttgcttaatgcgcgcagccagcaatgtattggtgtagagattttgctgcgctggaacaatccgcgtcagggctggatttcaccggatgtgtttattcctatcgcggaagaacatcatttaattgtgccactaacccgctatgtgatggcagaaaccattcgtcagcgccatgttttcccaatgagtagtcagtttcatgttggcattaacgtcgcacccagtcattttcgccgtggtgtgctgataaaagatctcaatcagtactggtttagcgctcacccgattcagcaactgatcctcgaaatcaccgaacgcgatgccttactggatgttgattatcggattgcccgcgagctgcatcgtaaaaacgtcaaactggcgattgatgacttcggcaccggcaacagttcgttttcctggcttgaaacattacgtcctgacgtgctgaaaattgataagtcatttaccgcagctataggttctgacgcggttaactcgacggtgaccgatatcatcatcgcactggcgcaaagactgaatattgaactggtggcggagggcgtagaaacgcaagaacaggcgaagtatttgcgcagtcatggcgtgcatattttgcaagggtatttgtacgcacagccgatgccgctacgtgattttcccaaatggctggcgggcagccaaccgccgcccgcccggcataatggacatatcacccccattatgccgttacgttaacgcttactcatcttcatcgtgcgccggttgctctttaacaatgcgaaccagatcaacacgataatcattggcttcaatgatggtgatatgcagtggccctacatcaatcacatcgcccacacggggaatgtgaccatttgccgaaatcacgaggcccgcgaccgtcgcgatatcatcgtcatcggcaaggtgctcaacatcaagcgcctgctgcaaggcatgcaaatctgtaccgccttttaccagccagccgtcaccgtcggtaatgatttccggcgtttcgtcagcgtccgggaattcacccgcaatggcttcaagcacatccagcggcgtgaccagaccttgtaccacaccaaactcgttggtcacgataacaaagctcccgcgagcacgacgcagcacgcccagcaggttgatcggatcgagggtttccgggacgataatcgccggagacgccgaagctatcgccgccacatcaactccctcttccagcgccaccagcagttctttagcacgtacgatgccgataatttcatccagttcaccgcgacataccgggaacaaactgtgcggtgaggagagcagctgctcgcggatttcatcgaccccgagattagcatcaacccagcttatttcaccgcgcggcgtcatgatcccgcgcagagaacgcgacgccagcgtcagtacgccgttaatcatgtaacgttcttcttcggcaaacgcaccttccgggatcggcatcggcatcgggttatcggcatcgtgctgaacattggcctgacgtttcccgcccatcaaacggagaatcgcatcggcagtacgcgctcgcagcggcaaagtcgactggtgacgaataaagttgcgacgcgcaatctggttaaacacttcgatgatgatcgagaagccaatcgcggcatacaggtaacctttcggaatgtggaaaccgaaaccttctgccaccagactcagaccaatcattaacaggaagctcagacagagcaccaccaccgtggggtgctggttaacgaatcgcgtcagcggttttgatgccagcagcataaccgccatcgcaatcactaccgccgccatcatcaccggcaaatggttaaccatccctactgcagtaattaccgcatccaacgagaagacggcgtcaaggatgacaatctgtgtgacgaccacccagaaactggcgtagcctttaccgtggccggaatcatgatcgcggttttccagccgttcatgcagttcagttgttgctttgaacagcaagaatatgcccccgaacaacataatcaggtcgcgtccggagaaggagaaatccatgacggtaaatagcggtttggtcagcgtgaccatccatgaaatcagcgacagcagccccagacgcataatcagcgccagtgataatcccagcaaacgcgctttatcgcgttgttttggcggcagtttgtcagcaagaatggcgatgaagaccaggttatcgatacccagcacaatttcgagaacaacaagcgtgagtagccccgcccaaatcgaggggtccattaagaattccatgacaagctcctgcttaaggaatagctattcgacgccagaaataatgcaggcgtaacgacaaaatgcaaacgaaaggtgcggcataaagtgccagaaagacaggcgttaaaaggcctgatgctgaaatgacgtcggtgacgatccatactgcgggctactgccctatactccatggttgttaaacaggagttaaacatatcagagacgcctctgatttggcaaagatttaccttcctttgcaaacgaatgtgacaaggatattttacctttcgaaatttctgctaatcgaaagttaaattacggatcttcatcacataaaataattttttcgatatctaaaataaatcgcgaaacgcaggggtttttggttgtagcccttatctgaatcgattcgattgtggacgacgattcaaaaatacatctggcacgttgaggtgttaacgataataaaggaggtagcaagtgaccattgctattgttataggcacacatggttgggctgcagagcagttgcttaaaacggcagaaatgctgttaggcgagcaggaaaacgtcggctggatcgatttcgttccaggtgaaaatgccgaaacgctgattgaaaagtacaacgctcagttggcaaaactcgacaccactaaaggcgtgctgtttctcgttgatacatggggaggcagcccgttcaatgctgccagccgcattgtcgtcgacaaagagcattatgaagtcattgcaggcgttaacattccaatgctcgtggaaacgttaatggcccgtgatgatgacccaagctttgatgaactggtggcgctggcagtagaaacaggccgtgaaggcgtgaaagcactgaaagccaaaccggttgaaaaagccgcgccagcacccgctgccgcagcaccaaaagcggctccaactccggcaaaaccaatgggaccaaacgactacatggttattggccttgctcgtatcgacgaccgtctgattcacggtcaggtcgccacccgctggaccaaagaaaccaatgtctcccgtattattgttgttagtgatgaagtggctgcggataccgttcgtaagacactgctcacccaggttgcacctccgggcgtaacagcacacgtagttgatgttgccaaaatgattcgcgtctacaacaacccgaaatatgctggcgaacgcgtaatgctgttatttaccaacccaacagatgtagagcgtctcgttgaaggcggcgtgaaaatcacctctgttaacgtcggtggtatggcattccgtcagggtaaaacccaggtgaataacgcggtttcggttgatgaaaaagatatcgaggcgttcaagaaactgaatgcgcgcggtattgagctggaagtccgtaaggtttccaccgatccgaaactgaaaatgatggatctgatcagcaaaatcgataagtaacgtattgtgttgattatcactcagttttcacacttaagtcttacgtaaacaggagaagtacaatggagattaccactcttcaaattgtgctggtatttatcgtagcctgtatcgcaggtatgggatcaatcctcgatgaatttcagtttcaccgtccgctaatcgcgtgtaccctggtgggtatcgttcttggcgatatgaaaaccggtattattatcggtggtacgctggaaatgatcgcgctgggctggatgaacatcggtgctgcagttgcgcctgacgccgctctggcttccatcatttctactattctggttatcgcaggtcatcagagcattggtgcaggtatcgcactggcaatccctctggccgctgcgggccaggtactgaccatcatcgttcgtactatcaccgttgctttccagcacgctgcggataaggctgctgataacggcaacctgacagcgatttcctggatccacgtttcttctctgttcctgcaagcaatgcgtgtggctattccggccgtcatcgttgccctgtctgttggtaccagcgaagtccagaacatgctgaatgcgattccggaagtggtgaccaatggtctgaatatcgccggtggcatgatcgtggtggttggttatgcgatggttatcaacatgatgcgtgctggctacctgatgccgttcttctacctcggcttcgtaaccgcagcattcaccaactttaacctggttgctctgggtgtgattggtactgttatggcagtgctctacatccaacttagcccgaaatacaaccgcgtagccggtgcgcctgctcaggcagctggtaacaacgatctcgataacgaactggactaacaggtgagcgaaatggttgatacaactcaaactaccaccgagaaaaaactcactcaaagtgatattcgtggcgtcttcctgcgttctaacctcttccagggttcatggaacttcgaacgtatgcaggcactgggtttctgcttctctatggtaccagcaattcgtcgcctctaccctgagaacaacgaagctcgtaaacaagctattcgccgtcacctggagttctttaacacccagccgttcgtggctgcgccgattctcggcgtaaccctggcgctggaagaacagcgtgctaatggcgcagagatcgatgacggtgctatcaacggtatcaaagtcggtttgatggggccgctggctggtgtaggcgacccgatcttctggggaaccgtacgtccggtatttgcagcactgggggccggtatcgcaatgagcggcagcctgttaggtccgctgctgttcttcatcttgtttaacctggtgcgtctggcaacccgttactacggcgtagcgtatggttactccaaaggtatcgatatcgttaaagatatgggtggtggcttcctgcaaaaactgacggaaggggcgtctatcctcggcctgtttgtcatgggggcattagttaacaagtggacgcatgtcaacatcccgctggttgtctctcgcattactgaccagacgggcaaagaacacgttaccactgtccagactattcttgaccagttaatgccaggcctggtaccactgctgctgacctttgcttgtatgtggctgttgcgcaaaaaagttaacccgctgtggatcatcgttggcttcttcgtcatcggtatcgctggttacgcttgcggcctgctgggactgtaagactgttgtacactaccggggccttttggccccgtttttttatctggaggattaatgacaatcacggacctggtactgattcttttcatcgccgcactcctggccttcgcgatctacgatcagttcatcatgccccgccgtaacggccccaccctgctggcaattcctttgctccggcgtggtcgcatcgatagcgttatcttcgtcggattgattgtcattcttatctataacaacgtcacgaatcatggcgcgctaataacaacatggttattaagtgcactggctctgatgggtttttatatattctggatccgcgttccgaagatcatctttaaacaaaaaggttttttcttcgccaatgtctggattgaatatagccgaatcaaagcgatgaacttgtcggaagatggcgtgttggtgatgcaattagaacagcgccggctgttaatccgcgttcgaaatatcgacgatctggaaaaaatttataagcttctcgtttcaactcaataagttatgaatttagccaaagctatgtttagtgtatttttaataatcagacatagcttaggctatattacctcttcccttatttgttatttattttaacgtttcattgatatataaatctaaatgaaaatcgttatcaataaagcaatgaaataatatattccaacagttgttttatattctcaaaatatgttaaggttgcgccctcatttggggagtagccgatttccagattccggaaatgtacgtgtcaacatactcgttgcaaaacgtggcacgtacggactgaacactttcagtcaggcgagaccatatgcacatcaatcgctatgcctgcatgaacgcgaaaaccatcgcggcttgttgttcatgtatgcatgtttgctgggggcgatgatgtgttttatggataccccggtcaggacgttgtcatgaatatcactgctactgttcttcttgcgtttggtatgtcgatggatgcctttgctgcatcaatcggtaaaggtgccaccctccataaaccgaaattttctgaagcattgcgaaccggccttatttttggtgccgtcgaaaccctgacgccgctgatcggctggggaatgggcatgttagccagccggtttgtccttgaatggaaccactggattgcgtttgtgctgctgatatttctcggcgggcgaatgattattgagggttttcgtggcgcagatgatgaagatgaagaaccgcgccgtcgacacggtttctggttactggtaaccaccgcgattgccaccagcttggatgccatggctgtgggtgttggtcttgctttcctgcaggttaacattatcgcgaccgcattggccattggttgtgcaaccttgattatgtcgacattagggatgatggttggtcgctttatcggctcaattattgggaaaaaagcggaaattctcggcgggctggtactgatcggtattggcgtccagatcctctggacgcacttccacggttaataagaacgctgccagaggtgaatattaaagtccgtctggcagtcgaacacttcttttgctgccagtgcttgccagacttcaggcttcgcacgccaggcaaacggcgtcatctgcaataatgcgacggcttcatcaccgcgaagacgcatcagataacacaactcatcactctgctgtaatgtaaaacctttcagttgttctgcatgaggtgcatgaagatgtacttcattgtaaatcagccccttcagctccattaagtgtctcggtcccggcgtggcagtaatgacccaaccgccgggcttcactactcgcactaattcttctgctttacacggcgcgtaaatacgtattatggcgtccatactggtatcggaaaacggcaaacggtggctggaagcgacacaaaaagtgacctgcggatagcgtttcgccgccgcttttatcgctaccttcgagacatccaggccaaacgtggtgatttcgggcaacgcatcagcaaatgcgtgtgtgtaatacccttcaccacagccaatatccagcaccgccgcggccttttcatcaagccgttcccgcagttggccgacaattgcatcacgcagcggctgataatgtccggcatctaagaatgcgcggcgtgcttgcatcatttccgcgctgtcgcccggatcacgagaccgtttatgctgaacgggcagcagattgacatacccttctttcgccatatcaaactgatgtcgctggggacagatatagctgtttttttcacgcgaaagaggctgatggcaaagtggacaggaaaacgacatgacaactccggcaggatactaaaggccgcaagtgtaacgcgaatcatgcggcgggcaaatatccgaacgactggagcgaagataaaacaaagtaaaaagcctcgcattcgacgaggctttatagcgagattgaagcgtattcacacttcagatcagtggattcgatcagatagctgttacgttaacagctgccggacctttctgaccgtcctgaatttcgaactcaacgttctgaccttcagccagagttttgaagccattaccctggatagcggagaagtgtacgaacacatctttgctgccatcagccggagtaatgaagccaaaacctttagactcgttgaaccacttaacctgacctttaatctttgccatttgaaaaattccttagattgttttcttcgcccgcaggcataacatagataaaactgacacattactgcatgaggcaccaatataaggctcggcagagaagcggtattcaacgtcaacgtgtttactcaggacttctttactgaaaatgccacacataaacagaactgtacctcgtttaacccgaaatctgttatcacatacaacgttaattatggcaagccatttttaaacatgtctcgatcagacgcacaaatctcgatacgtcttccactttttttgcacacttatgcaacggaatacgcgccgatatatcattgtgcttaaccttgccagttcaggcagatacttaaactgacgtattttctaacatagttcaataagttcagttgttccaggcctgtgggagaagttattacatagtgcgtgcaatatcacattttctactatgcaatgaataaaaagttatatcactttttctcataaaacagtcagttaacggctatcaattaccccaaagagaagtcaatctccaaaggtattgtaaatttaaaataagaaaaattgatgaatgagtaaaaaaatcaagagagaaacgtttcgctaataaataataccacacttaatcacaaattcgatgtaaacatcctaataaattaatggggtaaatatctttttctgatatcccgttacgcaaataaataatatgataattatttgaagtcagaccagagttttaatttgaagcagttgcaccatgacagtgcgtataatcagcatgaattgagtaacccttcaacgacggggttactcaagattgaggaaggattatcgttcggcgaccagacgaataatatcttcgtcttcaaccgatttttgactctcaacggtctttttatctgctttctcaggttcgtttgcttcgcacaaacgacgtaacagtgcattttgacgtttttgctgatccagcaacgcctcaagcagttcaatctgttcgttagtccgtgaactggcacgattgataaaaaaccacaagatgagcccgataagaagaaccaccaccgatacaaccaaagacgcaatgttcatcacgcctgaatttacaacttcgttcatttcaccacctctgagtagaggcgctattctaccactgctggagaggaagaaaatctagtgctgaaaaaatgatatcaccacgggataaactggttaatggcacaaattccgctgaaaaattgtacatcctgatcgcacatcatgttgaatacctgcgcccaaagcagcaagcacgccaacaccacgacaaccagagcgacccatcgaaactttttcactccaatctccgtttcacctaccttatgtcattaaactagcatgcgttagttaaacagcgcctaactatgtcgatattcgtgctttttcggaatgagtcgcttgcttcagcgcatattgccgctacgattaagcgaacataaaaagagaagaggttgtaatgcgattcatcattcgcacagttatgctgatagcgctggtatggataggattattactcagcggatatggcgttttgattggaagcaaagagaatgccgcgggattaggtttacaatgtacctatctgaccgccagaggcaccagcacggtacaatacctgcacactaaaagtggttttctggggataacagattgcccgttgttacgtaaaagcaatattgtggtcgataatggttaaggataataaataaccagattctcactcatgagtaaaatattcttatcgcaagtgcgtttaatataacgccaccttcaactttatttttctcatgctaaataaagaacctgtctgtttgatattcagacaggttcttactctcctcagaacggatagtcgtgataacccatttgggcagaaattttgcgcgccgcggtatgcaacattgcgacatattcctgtaaacgctcttcagagaaacgcaacgtcgggaaggagatgctcagaccggcaatgaccacgccaaagcgatcaaataccggaaccgcaatgcaacgcagtccttcttcctgctcttcattatcttcgccatacccctgctcgcgcacctggtccagaacgggtaataacgcttctgtactggtgatggtccgctcggtactgcgtttatactccacgccctcaagaatttgcatcacttcatcgcgatcgcgccatgccagcagtaccttaccaatcgcggtgctgtacagcggattacgacgcccaatccgtgaatacatgcgcaaattgtacattgagtcaattttgtggatgtaaacaatactgtcttcgtccagtgcgccgaggtggatagtttctttggtcaggcgggagatctcacgcatctggatatctgcgctacgaattaaatcgacgttttgcaacgcgcgagcgcccagttcgaacaatttcagggtcagcgaatatttctccgactccccttcctgcgccacataacctaaagttttcatggtctgtaaaaagcgataaacggtgctttttgacatcatgacgcgctgcgacaactcggttatccctatttcgcgctcttcacccagcgcctgcaaaatgccaaaaacttttagcacggaagatacagaatcaggctgtttatccagatctgcgttagccatttatcacctcattgcgagtgttttataaaaatcagaactgttttttattataatttcgcacctgggtggtcgcaatccatcttttgccggttagttacaattctgcgacatccaccgtgaatatcagtgctagaatcatacccctgttgattattcaccaaagatataaaattcctatgccaaaagttcaggccgacggcctgccattgcccctgcgatacggtgcgatattaaccattgtgattggtatttcgatggctgtccttgacggcgcaatcgccaacgtcgccttgccaacaatcgctacggaccttcatgccacgccggccagttccatctgggtagtgaacgcctatcaaatcgccattgtcatctccctgctctcgttttcgtttctgggcgatatgtttggctatcgacgtatttataaatgcggtctggtcgtttttctgttgtcttcactgttctgcgccctttctgattcgctgcaaatgctcacccttgcgcgtgtcatacaaggtttcggcggtgcagcgttgatgagcgttaataccgcacttatccgcctgatctatccacaacgttttctgggtagagggatgggcataaactcgtttattgttgccgtctcttctgctgccgggccgacaattgctgcagcaatcctctccatcgcatcctggaaatggttatttttaatcaacgtaccgttgggaattatcgccctgcttctggcaatgcgttttctgccacccaatggttctcgcgccagtaaaccccgtttcgacctgcccagcgccgtgatgaacgcgttaaccttcggcctgcttatcactgcgttgagtggtttcgctcaggggcaatcgctgacattgattggtgcggaactggtggtaatggttgtcgttggtattttctttattcgccgccagctttctcttcccgtaccgctgctaccggtggatttactgcgtatcccgctgttttcactttctatttgcacatctgtttgctctttctgcgcacaaatgctggcaatggtttccctgcccttttacctgcaaaccgtgctcgggcgtagtgaagtcgaaacaggtttacttctgacaccgtggccgttagcaacgatggtgatggctccactggcaggctatttgattgaacgcgtacatgcaggattgctgggtgctttagggttattcatcatggctgcggggcttttttccctggttctgctgccagcgtcacctgcggatatcaatattatctggccgatgatcttatgtggtgctggatttggcttgttccagtcacccaataaccacaccattattacctccgctcctcgcgaacgtagcggtggagccagtggcatgttagggacggctcgtcttctgggtcagagtagcggcgcggctctggtagcgctgatgctaaatcagtttggtgataatggtacgcacgtctcgctgatagctgcggctattctggcagtgattgctgcctgtgtcagtggtttacgtatcactcagccacgatccagggcataaaaaaagcgcgtcgatcaggacgcgctttttagtatttacttcatattacttcaggtattcacccgtacgcagagcttcaatacgtttatccagcggcgggtgagtcatgaacaactcactgagcgatttcgacttcccgttaatgcagaaagccatcatgctggttgcttcttgcggttcatagctggttttcaggcgctgcaatgcagcaatcattttctcgcgaccaaccagttttgctgaacccgcatcggcgtggaattcacgatgacgcgagaaccacatggtgataatgctcgccagaataccaaacaccagttccagaaccgttgcaaccgcaaagtagatcagcgggttgccgttgctctcttcaccttcatcacggtttccgcccataaaacccgcggcaagctgcgccagaatacgggaaataaagataacgaaggtgttcaccacgccctgaatcagcgtcatggtgaccatatcaccattggcgatgtggctgatttcgtgagcaattaccgcctcggcttcatccgggctcatgttctgcagcaaaccggtgctgacagcaaccagagaggcatcacggcgcgcaccggttgcaaaagcattgatgtccggcgcatggtagatagccacttgcggcatagcgatccccgcctgacgagcctgggttgctacagtattgaccagccaacgttccctttcgttacgcggttgctcgatcacttccccgccaacagatcgtaatgccatccatttggacatcagaagcgaaacgaaggaaccaccaaaaccgaacagcaaggccatgatcatcagcccctgaacgctgctcgactgtatccctgtcaggctcagtaccagcccgaaaacgaccattacggccaggttcgttagcaggaagagcgcgattcgcatcataattttctttttacctcagtttaacaaaacgcaatatgcgatacccacatcgtatgggttacgcgactattttcaagtctggatagtgcgtaagtcaccagaaagacacaactttacattttgtagcatctgatttacggcatcttgccgctgttaaaaaatcaggcacaatttcttgtgcctgattgatattacttgacgggagcgggttgttccgcgggtctggctttttcaagcttcgccagatcgagtgcgatattcaccgtctcatccagataaggatctggctcctggtaatctttcggtagatcatccagtttcttcaactccggtttaccttcgcgtttaaagcgttcgttcaaacgcgccagacgcgtcgcatcatcttcattattctctttctcacgcacagcgtaattcagagaaacgatattgcgcttgtccttcatagcgttgaagcgcgcgatatccttcatgatgttctggaactcaggatctttcgcgatacgcgcattatgttccttcagcagctccggttcaaaggccgttaaatctcctgatttcacataagtcgcggcatcaatgctatcccacggcagcgcgttatcttcgaatttctcacccgtttccgtttcttcattacccgtcggcatgatgatgtctggcgttacgcctttacgttgcgtactgccgccgttaacgcgatagaatttctggatcgtgtactgcacagaacccagcgctggccattcaggacgtaacatctgatcgtaaatacggtttaatgaacggtactgctgaacggtgcctttaccaaatgtcggttcacccacaaccagggcacgaccgtaatcctgcattgccgcggcaaagatttctgaagccgaagcactgaagcggtcaaccagcaccaccagcgggcctttatagaagacctgtccgtcggtgtcgctgtcttcacgaaccttgccgttgttatcgcggacctgaacaatcgggccggatggaatgaacagaccggagagcgatacggcttcagtcaacgccccaccaccattgctacgcaggtcgataatcacactgctgacattctgtttttccagtttctgcaattgcactttgacatcgtctgtcaaacctacatagaagcccggaatatccagcacgccgactttctctttaccgacggtcttcaccgacattttaaccgcgcggtcttcgagacgaatacgttcacgggtcaacgttaccgtacgggtcttggtccctttaccagcaggtaaaatttccagacgaaccttactgcccttaggccctttaattaaggccaccacatcatcaagacgccagccaatcacgtcaaccatcggcttgcctgtttgaccaacaccgacaattttgtcaccaacgctgatagctttgctcttcgctgccggacctcctgccaccatcgaattgataacggtgtagtcatcatccatttgcagcactgcgccaataccttccagcgacaaactcatttcagtgttgaactgttcggtattacgcggggaaagatagttggtatgcgggtcgatttcacgtgcaaacgccgtcattgccagcgagaaaacatcttcgctgttggtttgcgccagacgacgaatggcaaatttgtagcggcgagtcagggtttcacgaatttccttatccgtttttcctgtcagcttcaggcttaactcgtcgaatttgactttactgtcccacagcgcgttcaactcagcctcgtttttcggccagggcgctttgctgcggtcaaggttataagtgtcgttgccggtgaaatccatcggcttttccagtaccgacaaagcgtactggtaacgttcaaaacggcgcttttgcgccagattgtagagatcgtagaaaacgtcgagtttacctgaacgcagttcatcgcctaactcagttttctttttcgcgaactgttcaacatcgcttgccagcagcacattgtggctgtaatcgagcagattcaggtagcggtcaaagattttggccgaaaatgcctgatcgaggtcgaactggcgataatgagaacgggtgaagcgcgacgttacgcgctcactcaccgtcgcatgctgcgtctcttcctttaataccggaatttgatcagcacgcgtgatatcttctacagcgaaggtctggcctgctattgcaagcaggccagctaacgcggtaagcctaaaaaacatgttcatgcctggcccggcctccgtttcagaacaccaggtgttctgcgcgcacaatcaaagacatacccgaattcagctggacgcggacgccgtctttggtgatttctaatacggtggcatccatcgcgttttgacccgctttcaccttcagggcttgtccgacagtcagagctgaaatgtcagaaaccggggtgtgctgttcttcgcgaggtgcttttactgtttttggcgctttctctaccggcttttgcgaacgaggtttacgttcagcgccttctttgcggcgtggcgtggtcggacgtggcttgcgttcgcggcgcggtgcgtcttctttctcaccagcagctgcggcagcttcgcgttttttcgcttgctgttcagcacgctgtgcctgaacacgcgctttcgcttcttcaagctgcttgcgagcatgctcgacatgttgctcgtccagctcaccgcatgggttgccgtcaagatcgacacgtgttgcgccgggtttaacaccgtaaagataacgccagctcgaagtgtagagacgtaaagcggatcgcaattgcgttttgctcaggttcatttccccggcaacacgatcgaccaaatcctgaaaaataccgattttcagcggacgcgcttcaccttccgcactgaaacagtggggaaaacgttcggccagaaacgcgattacttctttactgctattcaacttaggttgattttccatgaaatttcctgattacaacggacgtagccaacaagcgcaggcatgaacaggcgtcattataatgacgctatcagtaaatgctacgttatccgttgattatcctgcgacgctcgcaaagaattttttgtaatccgtcgttgcaagcactttttcaagctgtgccacaagctgacgtaagccttgctcatcctcgtctgtaaagcgaccgaagacggtactatcgatgtcgagaacaccaataatctgatttttcaccaccagtggcagaacaatttcagaattactcgccgcatcacaggcaatatgcccgtcaaacgcgtgaacatcctcgatacgctgcacttgattgcgggcaaccgcagtgccgcatacgccgcgcccaacgggtatccggacacaggcaattttgccctgaaatggtccgagcaccagtgtatcgtcctcaagcaaataaaaacctgcccagtttacgtcagtgagacgctcatataacaacgcactggtgttcgcaagcgttgccagaaaactggtttctcccgccatcagcgcgttaaagtctgcgatttaaatccagtccgtaaaattctgctttgttcattatataatcaccttggttgtcttacctggaactgccagcctattaaaataagcattaaatgcgttaatgctcaagatcattcccatcatgggttaagattaatgttaattcttattacatttggcacgtcatggctcttaacacaccacaaattacgccgacaaagaagataacagtgagggctatcggcgaggaactgccgcgtggtgattaccaacgttgcccgcaatgtgacatgctgtttagcctgcccgagataaattctcatcaaagtgcctattgtccgcgctgtcaggcaaaaattcgtgacgggcgcgactggtcgctaacgcgcctggcggcaatggccttcaccatgctgttgcttatgccgtttgcctggggcgaaccgctgttgcatatctggctgttaggcattcgtattgacgccaacattatgcaaggcatctggcaaatgaccaaacagggcgatgcgataacggggtcgatggtctttttctgcgttatcggtgcccccctcattctggtgacctccatagcttatttatggtttggtaaccgattgggaatgaatttacgcccggtactgctgatgcttgagcggctgaaagagtgggtgatgttggatatctacctggtcggcattggcgttgcttctataaaggtacaggattatgcccatatccaggcgggggtcggcttgttctcttttgtggcgttggtgattttaacgacggtgacgttgtcacatcttaatgtcgaagaactgtgggagcgattttatccgcagcgccccgctacgcgtagggacgagaaactccgtgtctgtcttgggtgccattttaccggctatcctgatcagcgtggtcgctgcccgcgttgccatatcccgctacgcctgcgtcgccgtcatagtctgcaaaaatgctgggcggcgctgttagcgtcaatcgttttgttgttacctgccaacctgttgcctatctctatcatttatctgaatggtggtcggcaggaagatacgattctttccggaattatgtcgctggcaagtagcaacattgcagttgcgggaatcgtgtttatcgccagtattctggtaccgtttactaaagtgatcgtcatgttcactttactgttgagtattcattttaaatgccagcaaggtttacgcacacgcattctgttactgcggatggtgacctggattggtcgctggtcgatgctcgacctgtttgtcatatctttaaccatgtcgctgattaatcgcgatcagatcctcgcttttactatgggaccggctgcgttttatttcggcgcagcggtaattttgactattcttgctgtggaatggctggacagccgcttactttgggatgcacatgagtcaggaaatgcccgcttcgacgactgaagcgcagattaaaaataaacgccgtatctcacctttctggctgctgccgttcatcgcgctaatgattgctggttggctgatttgggacagttatcaggaccggggcaatactgtcaccatcgactttatgtcggcggatggtattgttccaggccgtacgcctgttcgttatcagggcgttgaagttggaacagtgcaggatatcagcctcagcgacgatcttcgtaagattgaagtcaaggtcagcatcaagtccgatatgaaagatgcgctgcgcgaagagacacagttctggctggtgacgccaaaggcctcgttggcaggtgtctccgggctggacgccctcgtcggtggtaattatatcggcatgatgccgggtaaaggtaaagagcaggatcactttgtcgcactcgacacccaaccgaaatatcggctggacaatggcgatctgatgatccacctgcaagcccccgatctcggttcactgagcagtggttcattggtctatttccgcaagatcccggtgggaaaagtctacgactatgccatcaatcccaacaagcaaggcgtggtgattgatgtcctgatcgagcggcgttttaccgatctggtgaaaaaaggtagccgtttctggaacgtttccggcgttgatgccaacgtcagtatcagtggcgcgaaggtgaaactggaaagtctggcggcactggttaacggtgcgattgccttcgattcacctgaagagtcgaaacctgccgaagcggaagatacctttggtctgtatgaagacctggcccatagccaacgtggcgtaataataaaactggaactgccagacggtgccggattaaccgccgactcgacgccgttaatgtatcaggggctggaagtcggacagctgactaaactggatttaaatcctggtggtaaagtcactggggaaatgaccgttgatcccagcgtcgtcaccctgcttcgtgaaaatacccgcatcgaattacgcaacccgaaattatcccttagcgatgccaatctcagcgccctgctgaccggaaaaacctttgagttggtgcccggcgatggcgagccacgcaaagagtttgttgttgtgccaggcgaaaaagccctgctgcaagagccggatgttctgacactgaccctgacagcaccagaaagttacggtattgatgctggtcagccgctcattcttcacggcgtgcaggtaggccaggttatcgatcgtaaactcaccagcaaaggcgtcacctttaccgtcgccatcgagcctcagcatcgcgaactggtaaaaggcgatagcaaatttgtcgtcaacagccgcgtcgacgtgaaggtggggctggatggcgttgagtttctcggtgccagcgcctcagaatggatcaatggcggaatacgtattctgccgggcgataaaggcgagatgaaagccagctatccactgtatgccaatcaggaaaaagcgctggagaacagccttagcgatttacccaccacaaccgtgagtttgagtgcagagacgctgccggatgtgcaggcaggatcggtagtgctgtaccgtaaatttgaagttggtgaagttattactgtgcgtccgcgagctaacgcgtttgatatcgatctgcatattaaaccggagtatcgcaaccttctgaccagcaacagcgtgttctgggcagaaggtggggcgaaagttcagctgaatggtagtggtctgactgtacaggcatccccgctctccagagcattaaagggggctattagcttcgataacctcagcggtgccagcgccagtcagcgtaaaggcgacaagcgtattctgtatgcttccgaaacagcggcccgtgcggttggcggacaaattacgcttcacgctttcgatgccggaaaactggcggtcgggatgccaattcgctatctcggtattgatatcgggcaaatccagacgctggatctgattaccgcacgcaatgaagtacaggcaaaggcggtgctctatccggaatatgtccagacctttgctcgcggtggtacgcgcttctcagtggtcacaccgcaaatttcggcagctggcgttgagcatcttgatactatcctccagccgtatatcaacgtcgaaccaggccggggcaatcctcgccgcgactttgaattacaagaggccaccattactgattcgcgttacctggatggcttaagcattattgttgaagcgccggaagccggttcgttaggtatcggtacacctgtgctgttccgtggtctggaagtaggtacggttaccggaatgacgctggggacattgtcagatcgcgtgatgattgcgatgcgcatcagtaaacgctatcaacacctggtgcgtaacaattcagtcttctggttggcatcgggttacagtctggactttggtctgacgggcggcgtagtgaaaaccggcacctttaaccagtttatccgtggcggcatcgccttcgccacgcctccgggtacgccactggcaccgaaagcccaggaaggcaagcacttcctgttgcaggaaagtgaaccgaaagagtggcgtgaatggggaactgcgcttcccaaataatgcccactgctccggcgtgcctgcgccggagcgtttatgctaaactgcgcgcctgtttttttgccagtggtatatgctcgtggcccaacacaccgtttatttcccggacgcctttctgacacaaatgcgcgaagcgatgccttcgacgctctcttttgatgattttcttgccgcctgtcagcgcccgttgcgccgcagcattcgcgttaatacgctgaaaacctccgttgctgatttcctgcaattaactgcaccttatggctggacgcttacgccaattccgtggtgtgaagaaggtttctggattgaacgcgacaatgaagatgcattgccgttgggtagtaccgccgagcatttaagcggcctgttttatattcaggaagccagttcaatgttgcctgttgccgccttgtttgctgacggtaatgcaccacagcgggtgatggatgtcgctgctgcaccaggttccaaaacgacgcaaattgctgcgcggatgaataacgaaggggcaatccttgccaatgagttttccgccagtcgggtaaaagtgttacatgccaatatcagccgctgtggcatcagtaatgttgcgctcacgcattttgatggccgcgtatttggtgcggcagtgccagaaatgttcgatgccattttgctggacgctccctgctccggcgaaggcgtggtgcgtaaagatcccgatgcgctaaaaaactggtcaccagaaagcaatcaggaaatcgcagcgacccaacgggagctgatcgacagcgcctttcatgcattacgtcctggcggtacgctggtttactcgacctgtaccttaaaccgggaagaaaacgaagccgtttgcctgtggctgaaagagacttaccacgacgcagtagagtttttaccgcttggcgatctcttccctggtgcaaataaggcgctgaccgaagacggctttttgcatgttttcccacaaatttacgactgcgaaggcttcttcgttgctcgtctgcgtaaaactcaggcgatccccgtcttacccgccccaaaatacaaagtgggcaatttcccgtttagcccggtgaaagatcgcgaagccggtcaaattcgtcaggcggctgcaagtgttggcttaaactgggatgaaaacctgcgactctggcagcgtgacaaagaactgtggttgttcccggtaggcattgaagccctgatcggtaaagtccgattttctcgcttggggattaaacttgccgaaacgcacaacaaaggttatcgctggcagcatgaagccgttattgcccttgcctcccccgacaatgtgaacgcttttgaactgacaccgcaggaagcggaagagtggtatcgcgggcgcgatgtttacccgcaagccgcgccagtggcggatgatgtattggttactttccagcatcagccgattggtttagccaaacggattggttcacgactgaaaaacagctacccgcgtgaactggtgcgcgacgggaaactttttaccggtaacgcctgacagcgcacaaaaaaagcgcactttttgactggcacattcaactgcctcaactaggctgaaaaatggtgcgatcggactggtcgtaccacaaccggcagctaaatggagagcacgaagatgaaaaccagtgtgcgcataggcgcttttgaaatcgacgacggcgaattacacggcgaatcgccgggtgatcgaacgttaaccattccttgtaaatcagaccccgatttatgtatgcaactggatgcctgggatgctgaaaccagtatccctgccctgctaaatggcgaacactctgtcctttaccgtacccgttacgatcaacaatctgatgcctggattatgcgtcttgcctgatccaaaaagaacccgtcggcatggcgggttatttgtccgggttattcccccgttgtaaaatctctcctaaacttaacggtacggcaccacacttcggggatgaaatgttcgcgctggtactttttgtttgctacctggatggcggttgtgaagacattgttgtggatatctacaacacggaacagcagtgtctttattctatgagcgatcaacggatccgccatggcggttgttttccgattgaggattttatagatggtttctggcgacctgcacaggagtacggtgatttttaattattgcaattgcacaagagtcagttctcccccaaagacagcaccggtatcaatataatgcaggttgccaatatccacgcgatggcgcaaaggtgtatgaccaaaccagaaatgatcagcacctgcaattccctgccctttttggcgttcacctaatcgcgagcggctccacaagacctgatgcaaatcgacgtccttttgccattcatagacatcatctggataatcggcatgagcaataacatgtttgccggtgcgactgtgtaattcaagaataaagggcaaatgctgacatttttccagcgccgttttcgcttgtttctgttgattatctgccagcgcaataaaccagtcgccgccatttatcaaccataaagacatctgccgggatgccagcgcatccatcgccatctgttcatgattgcctcttaccgcacgaacccaatgttgttccagtaactgcaggcaacgtaaactttgcggcccacgatcgataacgtctcccactgagataagtaaatctcgccacggatcaaaacgacaatgccataatttgcggcgcaactgctcaagacaaccgtgtatatcgcctgaaagccagatatgtcgccattgatgacccgcaattctctgataaacgggcgcaggctgtttcatcaatattttcctcccgcgctaaagatcacataatcttaacaagaatgttaaaaaacgctggactcagacagtagagtgtgtgttatggttgactataaagtcagcgaagggaatgcttctggcttttaacagataaaaagagaccgaacacgattcctgtattcggtccagggaaatggctcttgggagagagccgtgcgctaaaagttggcattaatgcaggcttagttgccttgctctttaagaatagatgacgacgccaggttttccagtttgcgtgcaaaatggtcaataaaaagcgtggtggtcatcagcttaaatgttaaaaaccgcccgttctggtgaaagaactgaggcggttttttattggaaatcaaaaggctattttaggtaattaacagagtttttcagctcgctctataaacggtgccagactcattttttcgccgggattgttaggatcatcaatctgaatcaccgaaatgggttgggctttagtcttcccactggcaacttccttttgtgcgatatcgtttaaaggatactgcacgagggtacttgggttaatgacatacaaagcattacccggtcggcaagtcagcatcacctcttcgcgattaaacgcccatttgtctttacccacttcaaaacggctgacggtaatcacctgcggtgccgccagcgcagctgcagaactggtgagtaacagaaacgccagaatactttttctcatcattttcgtaatccatcaaaaaggttcgagagtcgcaagcaggctgatgatcaccagcactaccgcacctatcgcccattcgagtttagtcatccagacaaaccagggagccgcacgatcttcatcctgcctcatgcgcggtacaagaacataacgattagccagcgcgatgaccaccataatcatcaccaggatggctttgagcaataagagttggccccagtaagtcgtaagcgtggggggaaatccggtaatcaacaatgcattaagcacgccgcttgccagtacgccgatcaccgcaaaatgcccgcaccaggaaaaacgcatcagcgcctgaatagcctggtgtcgccaacggcctttgatgagttgcatacaccagagcaccggcagtaatcccccaaaccacgccgccgcacagatcaggtgaattgcgtgattagtctgatggattttcgccgttaccccttcattcaacgtcgcatgcccgactcccgccagcagaataaattgcgcggtagtgagcataaacagcaaacgtggcatattccgcggttgcataagggcgacgatcaacgttacgagggcgagaacaatttgccataaccagacgccaccaaactgcgtttgcaaaacagccaaccaaatgtttggcgaaaatacatctgaccatcccgctcccatcaacccgccctgaacggcgagcattgcagtggcactgatcaaactccagacggcagcgtgctgttgtaaacgcagaaaacgcttcgtcagcaagcgacgaatcgttaagggggccagccaggcaccgtacattgcgaagccaaaaaccagcatcagcgaggtgaaatggataaatcgcagcgcgatccaggtaaacgccagcatgatttatttcacactaaaggtgtaatgtcctttcgttttatgcccatccaccgaaacaacatgccagtcaacggtgtaggttccgggtttcagcgaatcggccagtggaacaatcagttgcttttggtcctgctcattccgcttcgccggtaatgttttaatattttcgttttttggccccgtgatttttgcaccactgaatcctgtttcaacgccttccgagaagtttaaagtgattgcctgcggagctgctgtcacttgtgcatttgccgcaggatactgatgcgttaaatgcgcatgtgcccagacggaaggtgtcaccaacgaagtggtcaggattgccagcgcgtagcgaagggagcgtgcagttgaagccatattatctattcctttttgtaataacttttttacagagcataaccttgtctaatgtctgagtcgaggatcatcaattccggcttgccatcaaggctcactcttagtaacttttgcccgcgaatgatgaggagattaagaatgctgaagaatctggctaaactggatcaaacagaaatggataaagtgaatgtcgatttggcggcggcaggggtggcatttaaagaacgctacaatatgccagtgatcgctgaagcggttgaacgtgaacagcctgaacatttgcgcagctggtttcgcgagcggcttatcgcccaccgtttggcttcggtcaatctgtcacgtttaccttacgagcccaaacttaaataaaacttatacatagttacactttcttacataacgcctgctaaattatgagtattttctaaaccgccccccataatttgcagtcattttgaaaaggaagtcattatgtcgttctggaaagttgcagcagcgcaatatgagcctcgtaaaacctcactcaccgaacaggtagctcatcatctggagtttgtgagggccgccgccaggcaacaatgtcagctgttagtttttccatcgctttctttactggggtgtgattattcgcgacgtgcccttcctgccccacccgatctctcgctattagacccgctttgttatgccgcaacgaccttgcgaatgaccatcattgccggccttcccgttgaatataacgatcgctttattcgtggaattgcggtgttcgcaccgtggcgaaaaacgccagggatctaccatcagagttatggtgcatgtctgggccgtcgttccagaaccatcacggtggtcgatgaacaaccgcaaggtatggatatggacccgacctgttcactgtttacgacagggcaatgtctgggagaacccgacctgctggcgtcggcccgtcgcttacaatttttttcacatcagtactcgattgctgtgctgatggcaaatgcccgtggtaacagtgcactatgggatgaacatggtcgtctcatcgttcgcgccgatcgtggttcattattgttagtcggtcagcgttcatcacagggttggcaaggcgatatcattccattacgctaggctttttcggcctggagcatgccatgttgcgcattatcgatacagaaacctgcggtttgcagggagggatcgttgagattgcctctgttgatgtcattgacggaaaaatcgtcaatcccatgagccacctggtgcgtcccgatcgtcctattagtccacaggcgatggcgattcatcgcatcaccgaagccatggtcgccgataaaccgtggattgaagatgtgatcccgcactattacggtagtgaatggtatgtcgcgcataacgccagctttgaccgccgcgtactgcctgaaatgcccggtgagtggatttgcactatgaaactggcccgtcgtttgtggccagggatcaagtacagcaatatggcgctatataaaacacggaagctcaatgtacagacgccgccgggcctgcatcatcaccgcgcgttgtatgactgttatatcaccgccgcgttgcttatcgatattatgaacacctctggctggacggcagaacagatggccgatatcaccggacgtccatcgttgatgacgaccttcacctttggcaaataccgtggcaaagcggtttccgacgttgccgaacgcgatccgggctatctgcgctggttgtttaataacctcgacagcatgagcccggagctgcgtttaacactgaaacattatctggaaaatacttaatccgctgactgagcgggtaatgttccctgtgccagcgcgaccagaaaagcatattccatcgctacgccttcgtacgatttaaagcgaccagatttaccgccatgacctgagtccatgtcggtacagagcaataaaagatggtcatcggttttcagctcgcgcaatttagcgacccattttgccggttcccaatattgcacctgagaatcgtgtaaaccggtcgttaccagtaaatgcggataaacctgtgcagtgacgttgtcatacgggctgtagcttttcatatattcgtaatattgcggatcctgcggattcccccactcttcaaattcgccggtggtaagaggaattgattcatccagcattgttgttacaacatcaacaaacggcacctaggcgataacgccgtggaacaattccgggcgttgattaatcgcaacgcccatcaacataccccccgcactcccgcccatcgcataacagagcgaaggagagccatagcccagttttaacaatgcatcgcaggcatcaagataatcattaaacgtatttttcttcttcagaaatttaccgtcctcgtaccattgttgccccagctcaccgccgccacgaacatggacaatggcgtagacaaatccacgatccaacaaactcaagcggctaaaactgaaatcggcatcaatacttgcgccgtaagaaccgtagccatacaccagcagcgggttgtgtcctttgcgaaaatgtttgcgatgatagaccagcgaaaccggaacttcgacgccatcacgggcgactatccacaggtgttcactgcggtaattcgccgcatcaaaaccaggaacttccgtttgttttaatacacgacgctcaccggtatccatatccagttcaaacaaagtatctggtgtggtcatggacgaataaccataacgcaatcgcgcggtttcaggttctggattgtaggcaatccaggtcacataggccggatcatcaaaggcaatgccaatgacttcccgggtcttgcggttaatttgccgcaaactggttaacccgcgctgacgctcttcaaccaccagccagtcggtaaacagcgtaaacccttccagcataatgttatcacgtggcggaattaactcttcccactgttgctcatcacgcatacgggtacggtataagccaaagtttttaccgtggcggttggaacgcagataaaaccgatgctggtagtgatcaaggctgtattcgtgatctttgcggcgaggcagaaaaacaaacggctcggcatcggccatttccgcgtccagcaggcgaacttcactggtggtggcgctggccagatgaatgaccacataatgcttcgaggtcgttttatgcaggctgacgtaataggtatcgtctttttcttcgtaaatcagtttatcttgcgatgctggcgtaccgatggcgtgacgccagacctgataaggcagcagcgtcactggatgcttgcgaacatagtagaaagtccaggagtcatttgcccagacaaagctgggttcaacgttatccagcagttccgggtaccagttacctgtttccagattacgaaaacgaatgccgtactgccgtcgggaaagaaaatcttctgccagtgccataatggtgttatctggcgtaatcgccattccgcccatcgaataaaactcactatgagccgcgcgcttgttggcatcgagcaatgtttcccactcgtcccactcttcactgaacgccgattgacgctggtagatagcatattcacagcctggttcataaatatgccgatagcggtagccatttttgatgtagggcgcagaaacttctcgttgcggaatgcggtcgatgatttcctttaagatgcgatcctgcaaggcttgttgcgaggccatcacccgatgaccgtaactattttcttgttgcagatagtccaggacttccggctgagaacgcgtatcgtcccgcagccagtagtaattatcgatgcgcgtatcgccatgaagcgtcatggcgtggggaatgcgggcggcttttggtagcatgttattgttctttctggttgaaacatcttataagggtggcaaaactcatcggggatgcaagcgaaacagggtagtcattgcttagatgatgacaggtaatggcgcggatatcgactgttatgcagacagagaaaatcagcctgttcaaatggctgtgcggttctggataacccgaaatagtcaacttcaggctatccagagagcggaattactccgccaaagtacgtttttgctgttcgagatcgcgttcaatgccttcacgaacgtcctgggggattttcagcgcatcacccagtgcattcaggtaactgcgttccataaaatgatcaatatcaatagccgcgcagctcaggaaatagatttccagcgcctcttcttcattgcggaccccagtagccaggcgttgtggatccagcggttgttcgattgcctgctcaatgagtacacgcccctgttcttccacgccggcttcacgcaattgcaggtcgattgccgcacgttctttggcatcaatatgaccatcacttttagcggcaaagaccagcgcaaggatcaaacgttccgtacgctcatccagcggcgtactttgcgcgccaaactgcggttcgtcctgatgcgccgcgcgaattttatctttgtatttattccacagcaccgtacccgctaccgctccgccgccaaccagtaacgcgtttgtgccatatttcgtaagaagtttacgtgctgatttatttgcgaccagcagcccagccagtccgcctaatgcgccaggcactaaaagtttgcccaatccctgatccgcagacgaggaggtagaagaacggctttgcccaagcagagattgcagttgatttaaccagttagccatatttgctcctcaataaccatttttagtgcctgtagcatagcggatgaggatgtcagaaaatgtatatcgagacaaaagatgcgcaaataagcggggcggtaggccgttattcaaagaaattcgcgccaggtaaggtgttcactgtatataaggtgataagggtattttaggtgaaagtagtttgacgttttgagtgaaactgtttgatgctgattgcccaatgcgacgctgttgcgtcttctcaggcctacgattatgttgcgttgtagggcggacaaggcacccgcgccgcatccgccaacggtcaatcgaattatcagaagccattaacgccgctgatattccgccattcccgctttgcagtccacgctgacctggtaatgaatatcggcacttttaccacgcacggttagcggtactgaccatttatcatctttcccctgaatgtcctgcaaactgacccatgccacgggatcggcctgaccgacaattttttgatcatcagcccagcgcgccacgcgattttgttggtaatcacgttttacgctcgcggcaattccggcagcatccagaccttcacactttgggaaagtgaccgacttgctggtttcattattggcagcgaaaactgatgcgcaggcagaaaccaacaacagccctaaaaacgcccctctttttttcatgtttttctccatagcacaatgattcaggagaaagcatggtacaaattttcaggagcgcaagttgcttcaggccgcgtgtgaggcatcttcctcttcggattcagcaccgacgacctgtggggacggtaatttgccggttttcagaatggtgctcagcacatctttttgttctgccagccatagcgaaagggcttcacgttgctcgtcttccatttgcactggagaatttgtcagccaggtgtcaagcagatcggccgtatcaagcatcttgtcataagcatcggcttcctttttgctggtaaacgacattttctcttcgccctcacgaatgactacgtatttaacttcaaccgccatttgcagcctctcataataactgtgattttatacagtatatttcttttcagttgggaaatcaacatcagcaatgaagacacacgcaaacgttttcgtttatactgcgcgcggaattaatcaggggatattcgttatgacgttattaggcactgcgctgcgtccggcagcaactcgcgtgatgttattaggctccggtgaactgggtaaagaagtggcaatcgagtgtcagcgtctcggcgtagaggtgattgccgtcgatcgctatgccgacgcaccagccatgcatgtcgcgcatcgctcccatgtcattaatatgcttgatggtgatgcattacgccgtgtggttgaactggaaaaaccacattatatcgtgccggagatcgaagctattgccaccgatatgctgatccaacttgaagaggaaggactgaatgttgtcccctgcgctcgcgcaacgaaattaacgatgaatcgcgagggtatccgtcgcctggcggcagaagagctgcagctgcccacttccacttatcgttttgccgatagcgaaaaccttttccgcgaagcggttgccgccattggctacccctgtattgttaaaccggtgatgagttcttccggtaaagggcagacgtttattcgttctgcagagcaactagctcatgcatgggagtacgctcagcaaggtggtcgcgccggagcgggccgcgtaattgttgaaaggcgtcgttaagtttgacttcgaaattaccctgctaaccgtcagcgcggtggatggcgtccatttctgtgcaccggtaggtcatcgccaggaagatggcgactatcgtgaatcctggcaaccacagcaaatgagcccgcttgcccttgaacgtgcgcaggagattgcccgtaaagtggtgctggcactgggcggttatgggctgtttggtgtcgagctgtttgtctgtggtgatgaggtgattttcagtgaagtctcccctcgcccgcatgacaccgggatggtgacgctaatttctcaggatctctcggagtttgccctgcatgtacgtgccttcctcggacttccggttggcgggatccgccagtatggtcctgctgcttctgccgttatcctgccgcaactgaccagtcagaatgtcacgtttgataatgtgcagaatgccgtaggcgcagatttgcagattcgtttatttggtaagccggaaattgatggcagccgtcgtctgggggtagcactggctactgcagagagtgttgttgacgccattgaacgcgcgaagcacgccgccggacaggtaaaagtacagggttaaacccggcaaaaaaacgctacaaaaatgcccgatcctcgatcgggcattttgacttttacagcttagcgccttctacagcttcgcgcgccagcttagtaatgcggtcgtaatcgcccgcttccagcgcatctgccggaaccagccaggaaccaccgatgcacagcacgcttttcagcgccaggtagtcacggtagttagccggagaaataccacctgtcgggcagaaacggacctgagagaacggacccgcgatcgcctgcagggctttcacaccgccgttagcttcagccgggaagaatttgaactctttcaaaccgtagtccatacccagcatcagttcggaaacagtgctgatccccggaatcagaggaatagtcccttcggtagcagctttcagcagcggctcggtcagacccgggctaattgcaaactgtgcacctgcttcagtgacttctgccagctgctgtggattcagcaccgtaccggcacccacaatcgcttcaggcacttctttggcgatagcacggatagcgtcaactgcgcactcggtacgcagagtcacttccagaacgcgcaccccaccagcaaccaacgcttttgccatcggcaccgcgtgttccagtttttttaccacgataaccggtacaaccgggccggtggtcaggattgattctgcacttgttttccagtttttcatcagagttttctctcgcctgattacaaatttgtcgtcttaaaaagtgatacaggttgcgccctgttcggcaccggacagtttttcacgcaaggcgctgaataattcacgtcctgttcccacgcgtgacgcgctcaggtcaggaatgtgcggttcgcgagcagccagttccgcttcgtctaccagcagcgtcagttcgcctgtctgtccattcacacgaatgatgtccccgtcgcgcacttttgccagcagcccgccatcgtaggcttctggtgttacgtggatagctgacggcactttacctgaagcgccggagagtcgtccatcggtaactaacgcaattttgaaacaccggtccaataatacaccaagtggcggcatgagtttatgtaattctggcattccgttcgcttttggcccctgatgacggacaacaacgacacaatcgcggtccagtaaacccgcttcaaaggccggcataacgtcatgctggctttcaaaaacaaccgctggcgcttcaatcacctggttctctaccggcacggcagaggttttcataaccgctcggcccaggttaccgcttaacacttttgtcccaccatgatgagagaaaggttgttcgaaggacgcgatcacattgttgtcgagtgatttttctgccccttcccgccagtccagttcaccattattcagccatggttcaagggtataacgagacagaccaaagcctgccaccgtattgacatcttcatgcagcaggcctgctttgagcagttcacgtaccagaaccggtacgccacctgccgcctggaagtggttaatatcggccggaccgttcgggtagagacgtgccatcagcggtacaacatcagaaaggtcagagaagtcatcccagttaatctgaataccggctgcgcgcgccatcgccaccaggtgcatggtgtggttagtggaaccaccggtcgccagcagtgcaacgataccgttcaccaccactttctcatcgatcatcttaccgatcggcatccattcattaccattaccggtcatgcgcgtaacctggcgcgcagctgcagcggtcaaagcatcgcgcagcggagaatccggatgaacaaaagaagagcctggcaactgcatccccataaactccaccaccatctggttggtgttggcagtaccgtagaaagtacatgttcccggcgcatgataagacgcggcttctgactccagtaatgccatgcggtccactttaccttcggcataaagctggcgaatacgcactttttctttatttggcaaaccgcttgccatcggtccagacggcacaaacaccgcaggcaaatgaccaaacgacagggctgccatggtcagacctgggacaatcttgtcgcacacaccgagaaacagagcaccatcaaacatgttatgggacagccccaccgccgcagacatcgcaatcacttcgcggcttaacagcgacaattccattccatcctgcccctgggtgacaccatcacacatcgccggaacaccgcccgcaacctgaccaaccgcattcgcttcatgcagggctttacgaatgatttccggatagtgttcataaggctggtgagcggagagcatgtcgttataggaggtgatgatggcgatattgttacgcaacatgcttttcaaagaggctttgtcttctggctggcaggcagcgaaaccgtgtgccaggttaccgcatgccaactgcgaacgatgaacggtcgaggttttcgcttgttctatccgggcgaggtaagcagagcgagtctcgcgcgaacgttcaatgattcgatttgttacgcgtaacaattgtggattcataaaggctcctgaaattgagttgtcagagcaggatgattcacaacacgtttcattcagaggattcatgactgaaacgcctgtaaccggagctcatagggcaaaaacgtttcagtcagtgtaataaaaaaagcctcgtgggtgaatccgcacgaggcctgaaagtgtaaaaattgttctacaatctgtgcaagatcatgttaccggtaaaataaccataaaggataagcccagatattactcaaactcattccaggaacgaccgtcacgggtaatcatcgccaccgaggcaacggggccccaggttccggcctgatacggtttcggcgcatcattgtccatcgcccacgcctcagtaatggagtctacccatttccaggcttcttccacttcatcacgacgtacaaacagtgcctgaataccacgcatggtttccagcagcagacgttcataggcatctgccagatgcgtttgattaaaagtttctgaatagctcagatccagcttggtgatttgcaggttatgtttgtggtcaaggccaggaactttattcagtacctggatatccacgccttcatcaggttgcagacggatagtcagtttattctgcggcagatcctgccacgactctttaaacagattcagttcaggtgttttgaaatagaccacgacttcagaacatttggtcggtagacgtttaccagtacgcaggtagaatggcacaccggcccagcgccagttatcaatgtcgacgcggatcgccacgaaggtttctgtattgctgctcttgttcgcgccctcttcttccagatagcccggcacttttttgccctgagcgaagcccgcagtatattgcccgcgtacggttttttcgcgcacgttggagcggtcgatgcggcgcagagacttcagtactttcactttttcatcgcggatgctgtctgcgctcaggtcagacggcggagacatcgcaatcatgcaaagaatttgcagcaggtggttctggatcatgtcgcgcatctgaccggctttatcaaaatagccccagcgcccttcgatccccacttcttctgccacggtaatctcaacatgatcaatggtgcgattgtcccagttgttcacaaacagagagttagcaaaacgcagcgccaacaggttcagcactgtttctttaccaagatagtggtcgatacggtaaacctggcactcctcgaagtattcgccaacctgatcgttgatttcctgcgaggtcgccagcgacgtccccagcggtttctccatgactacgcgtgccggtttagcattcagttttgcctcaccaagccctttgcaaattgcgccaaaagtgctgggcggcatggcaaagtagttaatggtgatacgatttttttgatccagcatcgcgccgagacggctgaatgcagcagtgtcattgacatcaagattacaaaaatccagacgtgcactcagggtgtcccataaaccttcatcaatggtttctttcatgaaagtttcgagcgcctcgcggacaactttggtataagccgctttatcccagtcagcacgccctacgccgataatccgggtgtccgggttgagctgaccggctttttccagttgatacagggaaggcagcaatttacgacgcgcaaggtcgcctttcgcgccgaaaatgaccaggtcacaggcctgggctgtttgcgttaccgccatgtcattctccttaagttaactaacccggtacttaagccagggtatacttgtaattttcttacggtgcactgtactgcttttacgagcttgcgaaaactgtaaacgcttatccacccgtgcgattacggtaaaagcgcgcaaagtgcggcaaaactgataaaaaaatcatcgttttccattgggtaaaaatctgacactgatcatgttatgaaaaaaaataacaacttttttatctgcttttgtcattaacacagcacacaggcgtaatatctgacaaaactgcatttcgatttctttcagagcggaaatcgtcattacccgtgagtctctttacatcatgaatatgctggaaaaaatccagtctcagctggaacatttgagcaaatctgagcgcaaagttgccgaggtcattctggcttcgcccgataacgcgatccattcgagtattgctgctctggcgctggaagccaatgttagcgaaccgacggtgaatcgtttctgtcgcagcatggacacacgcggttttcctgattttaaacttcatctggcacaaagtctggcgaatggcactccctatgttaatcgcaacgtcaatgaagatgacagcgttgaatcatacacggggaaaatatttgagtccgcaatggcaacgctcgatcatgtccgtcattcactggataaatctgccatcaaccgcgccgtcgacttgctcactcaggcaaaaaaaatcgcctttttcggattaggttcttcagccgccgttgcccacgatgcgatgaataagttctttcgttttaatgttccggtggtgtactccgatgatatcgtgctgcaacgcatgagttgtatgaattgtagcgacggggacgtggtggtgctgatttctcacacgggaagaacaaaaaatctggtcgagctggcgcagctggcacgcgaaaacgacgctatggtaattgccctcacctctgcgggtaccccgctcgcccgggaagcaacgctggcaattactctcgacgtaccggaagatactgacatttatatgcccatggtttctcgacttgcacagctgaccgtgatagatgtgctggcgacaggatttactttgcggcgcggtacaaaattcagagataacttgaagcgggtcaaggaagcgctgaaggaatcgcgttttgataagcagttacttaatttaagtgacgatcgctaaaaacgactgtcactgtcctaatcttatacgacatccgaatgagattaatttatcgccatcgcggcgttatttcattcggatttcatgttcaagcaacacctggttgtttcagtcaacggagtattacatgtccagaaggcttcgcagaactaaaatcgttaccacgttaggcccggcaacagatcgcgataataaccttgaaaaagttatcgcggcgggtgccaacgttgtacgtatgaatttttctcacggctcgcctgaagatcacaaaatgcgcgcggataaagttcgtgagattgccgcaaaactggggcgtcatgtggctattctgggtgacctccaggggcccaaaatccgtgtatccacctttaaagaaggcaaagttttcctcaatattggggataaattcctgctcgacgccaacctgggtaaaggtgaaggcgacaaagaaaaagtcggtatcgactacaaaggcctgcctgctgacgttgtgcctggtgacatcctgctgctggacgatggtcgcgtccagttaaaagtactggaagtccagggcatgaaagtgttcaccgaagtgaccgtcggtggtcccctctccaacaataaaggtatcaacaaacttggcggcggtttgtcagctgaagcgctgaccgaaaaagacaaagcagacattaagactgcggcgttgattggcgtagattacctggctgtctccttcccacgctgcggcgaagatctgaactatgcccgtcgtctggcacgcgatgcaggatgtgatgcgaaaattgttgccaaggttgaacgtgcggaagccgtttgcagccaggaggcaatggatgacatcatcctcgcctctgacgtggtaatggttgctcgcggcgacctcggtgtggaaattggcgatccggaactggtcggcattcagaaagcgttgatccgtcgtgcgcgtcagcttaaccgcgcggtaatcacggcgacccagatgatggagtcaatgattactaacccgatgccgacgcgtgcagaagtcatggacgtagcaaacgccgttctggatggtactgacgctgtgatgctgtcggcagaaactgctgctggtcaatacccgtcagaaactgttgcagccatggcgcgcgtttgcctgggggcggaaaaaatcccgagcatcaacgtttctaaacaccgtctggacgttcagttcgacaatgtggaagaagctattgccatgtcagcaatgtacgcggctaaccacctgaaaggcgttacggcgatcatcaccatgaccgaatcgggtcgtaccgcgctgatgacctcccgtatcagctctggtctgccaattttcgccatgtcacgccatgaacgtacgctgaacctgactgctctctatcgcggcgttacgccggtgcactttgatagcgctaatgacggtgtagcagctgccagcgaagcggttaatctgctgcgtgataaaggttacttgatgtctggtgacctggtgattgtcacccagggcgacgtgatgagtaccgtgggttctactaataccacgcgtattttaacggtagagtaagtacgttgccggatgcggcgaaaacgcctcatccggcctacagttcaatgataattcaacagatttcgaatcttctgaagcaaacttgaacttatcatcagtcgaaggcctctcctcgcgagaggcattttttatttgatgggataaagatctttgcgcttatacggttggatttcgcccggtttgcgagttttcagcaattttaatatccaggtgtattgttctggtcgcggaccaacaaaaatctcgacttcttcattcatccgccgcgcaatcgtatgatcatccgcctctaacagatcatccatcggtgggcgcacctgaatcgtcagacgatgcgtcttgccatcataaatcggaaatagcggtacaacgcgcgcacggcacactttcatcaaacgaccaatcgcgggcaacgtcgctttataggtggcaaagaaatcaacaaattcgctgtgttctgggccatgatcctgatcgggtaaataatatccccagtaaccctgacgtaccgactggatgaatggtttaataccatcatttctcgcatgcagacgaccaccaaagcgacggcgcaccgtgttccagacataatcaaaaaccgggttgccctgattatggaacatcgctgccattttctgcccttgcgaggccatcagcatggcaggaatatcgacggcccaaccgtgcggcaccagaaaaatcactttctcgttattacgtcgtatctcttcgatgatctccagcccttgccagtcaacgcgcggctgaattttctccggcccgcgtattgccaactcagccatcattaccatcgcttgcggcgcggtggcaaacatctcatctacaatcgcttcgcgttcagcttcactacgttctggaaagcagagcgacagattgattaacgcacgacggcgtgagctttttcccagtcgtccggcaaaacgtcccagccgtgccagaatgggatcacggaactttggcggcgttaaagcgatacccgccatcgctgctacgcccagccatgctccccagtagcgcgggtggcgaaaggatttatcaaactcaggaatgtattcgctattattttttttcgtttccatgcttttccagtttcggataaggcaaaaatcaatctggtgatagtgtagcggcgcaacttgccccgcaccaaataaaaaagccggtactgactgcgtaccggctgcgaatggatgttaattaatcaaaccgtagctgcggcacaatctctttggcctgtgccaggaattcgcgacgatcggagccggtcagcccttcggtacgcggcagttttgccgtcagcgggtttacggcctgctggtttatccatacttcatagtgcagatgcggcccggttgaacgtccggtattaccggaaagcgcgatacggtcgccacgtttcaccttctgtcccggtttcaccaggatcttgcgcaagtgcatataacgcgtggtgtagctgcgaccatgacgaatagccacataataacctgctgcgccactacgtttggcaaccaccacttcaccgtcacccactgaaagcactggcgtaccttgtggcatggcaaaatcaacacctctgtgtggcgcaacgcgaccggtcaccggattagtacgacgcgggttaaagttagatgagatacggaactgtttcgccgtcgggaatcgcaagaatcctttcgccagaccagtaccgttacgatcgtagaatttgccatcttcagcgcggattgcgtaataatctttaccttctgaacgcaaacgtacgcccagcagctggctttgctcacgtttaccatcaagcatttctcgtgacattaacaccgcaaattcatcgccttttttcagtttgcggaaatccatttgccactgcatggctttaatcactgcgctcacttcggcgctggttaaaccggcgtttctggcgctggcaacaaagcttcccccgacggtacctttcagcagattgttgacccactctccttgctgcatttcgctggtcattttaaaaccgttagcggcagtacggtcataggttcgggtttcacgacgagacacttcccaggtgaggcgctgcagttcgccgtccgcggttaatgtccaggagagttgttgaccgattttcaggttacgcaattctttgtcggcagcagccagttgggtgatatcacccatatcaataccatactgattgagaatgctgcttagcgtatcgccagtggaaacaacatattcatgcacgcccgcttcaccggcgattttgtcatccagttcgtcctggggaatggcttcatcttcttgtgcagcttgatcaatcggctcactggcttcaggtaagagcgaacgaatttcgttctgttccagctcaatggttttgacaattggcgtggcatcgcggtgataaacatagggccgccagacagcgacggccagagtaagaacggtgagcgaccccaacataacgcggtgtggtcgcggtaaattattaaacgccagggcgacagagcgggctatctgttgcacgtaatcacttcctcattaatctcctttcaggcagctcgcatactggttggctaattgattcaggaattctgaatagcttgttttacccagtttgatattcgtccccaggggatccaacgttcccatacgaacggatgtccctcgtgcgacgctctcaacgaccgctggcctgaactgtggctcagcaaaaacgcaggttgctttttgctcaaccaactgtgttcttatttcatgtaaacgctgcgcgccaggttgaatctcagggttaacggtaaaatgaccaagcggtgtcagtccgaactgtttttcgaaatagccgtaagcatcgtgaaaaacgaaataacctttccccttgagcggcgcgagctcgttaccaacctgcttttcggttgaggctaattgtgcctcaaaatccttcaggttggcgtcaagtttggctcgactttgcggcataagttccactaattttccatggattgcaaccgctgtagcccgcgctatctctggggaaagccaaagatgcatgttgaaatcgccgtgatggtgatcttcgtcacttttttccgcgtggtcgtgatcatcatcatcgccgtgaatacttttcatcagcagcggtttcacattctctagctgcgcaatcgttacctgtttcgcttcaggtaatttacttaccggtttttgcatgaacgcttccatctccgggccaacccaaacgactaagtccgcgttctgtaagcgttttacatctgatggacgcagtgaataatcatgttctgaagccccgtcaggtagtaaaacctccgtttctgttaccccatcagcaatggcagaagcgatgaacccaacgggtttaagcgaagcgacaacggcagcatctgcggcctgtgttgcaccgccccagagagcggcggataatgctgcgaaaagaagcgtttttttatgtaacataatgcgaccaatcatcgtaatgaatatgagaagtgtgatattataacatttcatgactactgcaagactaaaattaacatgacaagtctggtttccctggaaaatgtctcggtttcttttggccaacgccgcgtcctctctgatgtgtcgctggaacttaaacctggaaaaattttgactttacttgggccaaacggcgcaggtaagtcgacactggtacgggtagtgctcgggctggtaacacccgatgaaggggttatcaagcgcaacggaaaactgcgcatcggctatgtaccgcagaagctgtatctcgacaccacgttgccactgaccgtaaaccgttttttacgcttacgccctggcacacataaagaagatattttgcctgcactgaaacgtgtccaggccgggcatctgattaacgcaccgatgcaaaagctctcgggtggcgaaacgcagcgtgtactgttagcgcgagcattgttaaatcgaccgcaattattagtgctggatgaacccactcagggcgtggatgtgaatggtcaggtggcgttatatgaccttattgaccaactgcgtcgcgaactggattgtggcgttttaatggtatctcacgatctgcatctggtaatggcaaaaaccgatgaagtgctttgcctgaatcaccacatttgttgttccggcacaccggaagttgtttccctgcatccggagtttatttctatgtttggtcctcgtggtgctgaacaactgggtatctatcgccatcatcataatcatcgtcacgatttacagggacgaattgttttgcgtcggggaaatgatcgctcatgattgaattattatttcccggttggttagccgggatcatgctcgcctgtgccgcgggtccgctgggttcgtttgtagtctggcgtcgtatgtcttatttcggtgatacgctggctcatgcctcattacttggcgtcgcgtttggtttgttgctggacgtgaatccattctatgcggtgattgccgttacgctgctgctggcgggcggtctggtatggctggagaagcgtccacagctggcgatcgacacgttattagggattatggcgcacagtgccctgtcgctgggcctggtggtcgttagtctgatgtctaatattcgtgttgatttgatggcttacctgttcggtgatttactggcagtgacgccagaagatctcatctctattgcgattggcgtggtcatcgtggtggctattttgttctggcaatggcgcaatttgctgtcgatgacgattagcccggatctggcgtttgttgatggtgtgaaattacagcgcgtgaaattgttgttgatgctggtgacggcattgacgattggtgtagcgatgaaattcgtcggcgcgttgattattacttcactgctgattattcctgctgctactgcacgtcgctttgcccgcacgccggaacagatggctggtgtcgctgttttggtggggatggtggcagtgactggcggtttaaccttttccgcattttacgatacacctgcaggcccgtcggtggtgctatgcgcggcactgttatttattatcagtatgatgaaaaagcaggccagctaatctgtcgctgaacacatttgtcggatgcggcgcgagcgccttatcccacctgcggttcgctatctctggtaggcctgataagacgcgaacagcgtcgcatcaggcacactgccagtgtcggatgcggctcgagcgaccaatccgacttacggcatttctggcggcgtgatgccgaagtggttccacgcccgcactgtcgccatacgcccgcgcggtgtacgctgcaaaaagccttgctgaatcaaataaggttccagtacatcctcaatggtttcacgttcttcgccaatggctgccgccaggttatccagacctaccggcccaccaaagaacttatcgattaccgccagcaacaatttgcggtccatataatcgaaaccttcagcatcgacattcaacatatccagcgcctgagcagcgatatctgccgagatggtgccatcgtgcttcacttcagcgaaatcacgcactcgacgcagcagacggttggcaatacgtggcgtaccgcgcgcacgacgagcaacttccagcgcgccgtcatcactcatctcaagccccataaagcgtgcgctgcgactgacgatatattgcagatccggcacctgataaaactccagacgttgcacaataccaaaacgatcgcgcaacggtgatgtcagcgaacctgcgcgcgtggttgcaccaatcagggtaaacggcggcaaatcaattttaatggagcgtgccgccggaccttcaccaatcatgatatccagttggtaatcttccattgccggatacaacacctcttccaccactggtgaaagacggtggatctcatcaataaacagtacatcgtgtggttcaaggttagtgagcattgctgccagatcgcccgccttttccagcaccggaccagaagtcgtgcgtaaattaacgcccatttcattggcgacaatattggcaagcgtagttttacccaaccccggaggaccaaaaatcaatagatgatcgagggcatcgccgcgcagtttcgctgctttgatgaaaatctccatctgcgaacgaacctgcggctgaccaacatactcttccagtaatttagggcgaatggcgcgatctgccacatcttccggcaaagtggtaccggcagaaatcagacggtctgcttcaatcatcctttacctcataacgcggcgcgtagggcttcgcgaattaatgtttcactgctggcgtcagggcgagcgattttgctcaccatgcggcttgcttcttgtggtttatagcccagtgccaccagcgcagcaaccgcttcctgttcagcatcgtcggtcgccgggctggcaggagacgtgagtaccaggtcggcggctggcgtaaagagatcgccatgcaaacctttaaatcggtctttcatttcgacaatcaagcgttcggcggtttttttgccaatacccggcagtttcaccagtgcccccacttcttcacgctcaacggcattaacgaactgctgcgctgacattccggagaggatcgccagcgccaacttcgggccgacgccgttggttttgatcaactctttgaacaacgtgcgctcttgtttattgttaaaaccgtacagcagttgcgcgtcttcacgcaccacaaagtgggtgaaaacgatcgcttcctgacccgcttcagggagttcataaaaacaggtcatcggcatatgcacttcatagcctacgccgcccacttcaattaacaccagcgggggttgtttttcaatgatgatgcctctgagtctgcctatcacatgacgctcctgcgtaatgaatcaaagataatgctgtatgataaaaaaatgctggatagatatccagcgaaggatgaagaaaacttgcgaggtgtctcgatgatctgaaaaatggcgcagtataatttattctacagattatattggaagcaaatatttaaatattacatattcagcgaagaaatgtgtaataaaaatacacattgcgacccctgaaaaaaataaattttttatgctattacgtatattcatatctatttcaatggaatgacaacgtgaatattaattatcctgctgaatatgaaattggtgatatcgtctttacatgtataagtgctgccttatttggtcaaatatcagctgcatcaaattgctggagtaatcacgtcgggatcattatcggtcataacggtgaagactttctggttgcagaaagccgtgttcccctctcaaccatcactacgctatcccgttttattaaacgctctgctaatcaacgctatgctataaagcgattagacgccggactaacagaacaacaaaatcaacgaattgttgaacaggttccttcccggctacgcaaaatttaccacaccggttttaaatacgaatcttcgcgccagttctgttcaaaatttgtttttgatatttataaagaggcgctatgtattccggtgggtgaaatagagacgtttggagaattgttaaatagcaatccaaatgcaaaactcactttctggaaattctggttcttaggttctattccgtgggagcgtaaaaccgtcacgccagccagtttgtggcatcatccgggtttggtgttgattcacgcggtgggagttgaaacgcctcagcctgaactgaccgaggcggtataacttaacgcagtcgccctctcgccaggttcagtcgcgattcgctcatttgcatcgcattctgactaacgtggcagtgggtgatggcaatcgccagcgcatcggcggcatccgcctgtggattagcgggcagtttcagcaaggtgcggaccatatgctgcacctggcttttttcggcactaccaatacctaccactgtttgctttacctgacgtgccgcatattcaaataccggcaattcctgattcaccgccgccacaatcgccacgccgcgcgcctgccccagtttcagggctgagtcagcgttcttcgccataaagacctgttcaatggcgaaataatcaggctggaattgggtgatgatttccgtcacgcccgcatagatgagcttcagacgagacggtaaatcatccactttggtgcgtatgcatccgctacccaggtaggacagttgcctgcctacctggcggatgacgccatagccggtcacgcgcgaacccgggtcaatgccgagaataatagccatcacgcgtctccgttttgctgtttagcaggcctcatcagagagtcgctgcaacctcatcagagatttcaccgttatggtaaacttcctgcacgtcgtcgcaatcttccagcatatcgatcagacgcatcagtttcggtgcggtttctgcatccatatcagctttggtggacgggatcatggaaacttccgcgctgtctgctttcagacctgccgcttccagagcgtcgcgtactttgcccatttcttcccatgcagtgtagacatcaatcgcgccgtcatcataggtcacaacgtcttcagcaccggcttccagggctgcttccatgatggtgtcttcatcgcctttctcgaaggagatcacgccttttttgctgaacaaataagctacggaaccatcagtaccgaggttaccgccacatttgctgaatgcatgacgcacttcagcaacggtacggttgcggttgtcagacagacattcaatcatgattgccgtgccgccaggaccgtaaccttcgtagatgatggtttccatgtttgcatcatcatcaccgcccacacctcgtgcaattgcgcggttcagagtgtcacgggtcatgttgttagacagtgctttatcaattgctgcacgcaaacgcgggttagcgtccggatcaccaccgcccagcttagccgcggttaccagctcacgaatgattttagtgaagattttaccgcgcttagcatcctgcgcagctttacgatgtctggtgttggcccatttactatgacctgccataaaaatatctccagatagccctgcctgttcaggcagcgttaattacaaactgttcaatcgcctgccggttgctccaggacttagtgagcgccgccgcagcagacgcatcaagccacttgtaagccagatgttcagtgaaaacgatctggcgctcgtgcggaagcgcaagacagaaccatgattccgtattacgcgtcacgcccggcgcatagcgatgacgtaaatgtgaaaaaatttcaaactctaccgtgcgctgacagtcaattaaggtcagttgttcagcgacaacatcaatggtgacctcttcctttacttcgcgcatggcagcttgcggcgcggtttcaccctcttccacgctgccggttaccgactgccagaaatcgggatcgtcacgccgctgcaacatcagcacccgtttcgtatcttgtgcgtagatgaccactaagatcgaaacgggacgcttataagccatatcagttattctcagccttcttcacaacctgaatgctcagctcagccagtgcagtcgggttagcaaagctcggcgcttcagtcatcaaacacgctgccgccgtggttttcgggaaggcgataacgtcacggatattgtcggtgccggtcagcagcatcgtcagacggtcaagaccgaatgccaaacctgcgtgcggcggagtaccgtatttcagggcgtcgagcaggaagccgaatttctcgcgctgttcctcttcgttgatacccagaataccaaacaccgtctgctgcatatcaccattatggatacgcacagaaccaccgcccacttcgtaaccattgatgaccatatcgtaagcgttagccaccgcattttccggtgcagctttcagttctgctgccgtcatgtctttcggtgaggtgaacggatggtgcattgctgtcaggccgccttcaccgtcgtcttcaaacatcgggaagtcgataacccacagcggtgcccatttgctttcgtcggtcagaccaaggtctttacccactttcaggcgcagtgcgcccatcgcgtcggcaacaattttcttgttgtcggcaccgaagaaaatcatatcgccatcttgcgcgccagtacgctccaggatggcttcgatgatttctgcattaaggaacttcgctaccgggctattgataccttccagacctttcgcgcgttcgttaactttgatgtaagccagacctttcgcgccgtagattttaacgaagttaccgtattcgtcgatctgcttacgggtcaacgatgcgccgcccggaacacgcagagcggcaacacggcctttcggatcgttcgccggacctgcaaatactgcaaactcaacagatttcagcagatcggcaacgtcggtcagttccatcgggttacgcagatccggtttatcagaaccataacggcgttctgcttctgcaaaggtcattaccgggaaatcgcccagatccacgcccttcacttccagccacagatgacgcaccagcgcttccatcacttcacgcacttgcggcgcggtcatgaaagaagtttccacatcgatctgagtaaattcaggctgacggtcagcacgcaggtcttcgtcacggaagcatttaacgatctgatagtagcggtcaaagccggacatcatcagtagctgtttgaacaactgcggggattgcggcagcgcgtagaatttacctttgtgcacacgagaaggcaccaggtagtcacgcgcgccttcaggcgtggctttggtcagcatcggagtttcgatgtcgaggaagccgtggtcatccataaaacggcgcaccaggctggtgattttagcgcgggttttcaggcgctgagccatttccgggcgacgcaggtcgaggtagcggtatttcagacgcgcttcttcggtgttgacgtggttagagtcaagcggcagaacatctgcacggttgatgatagtcagcgaggacgccagtacttcgatttcgccagtcgccatatcgcggttaatatttttttcgtcacgcgcacgtacggtgcccgtgacctgaatgcagaactcattacgcagttcagaggccagctttaacgcgtccgcacgatccggatcgaaaaatacctgcacgataccttcgcggtcgcgcatatcgatgaagatcaggctaccaagatcacgacgacggttgacccaaccacacagagtcacctgctgccccacgtgggacaaacggagctgtccacaatattctgtacgcatgagatatcccttaacttagctgccggcggatgccccctgctgcgcaggtgaccaagtcgcagcgttagctgtatgtcacaactgaatgaaaaaaggcggctattatactggaaattctgccgcaccgtaagagcctggcccgcgctggaacgcctcgttaccactttatatcgggcctgaaatcagactctacgccagtttgctataaaggtgttgcccgaactcataaaaattaacaaaatttgtcgttccgccatcggctaatcgcattaaggtgagaggcacgattttgttttgtcaggagtcatcatgcttgaacttaatgctaaaaccaccgcgctggtggtgattgatttacaagaaggcatcttgccttttgccggaggtccacatactgccgatgaggtggttaatcgcgccgggaagctggcggcgaaatttcgcgccagcggtcagcccgtgtttctggtgcgcgttggctggtctgccgattacgccgaagcattaaaacagccggttgatgccccctcccccgcaaaagtgttgcccgaaaactggtggcaacatcctgctgcattaggtgcaaccgacagcgatatcgaaatcatcaaacgtcaatggggtgcgttttacggtacggatctggagttgcaattacgccgccggggtatcgatacaatagtgttatgtgggatctcgaccaatatcggtgttgaatccaccgcccgcaatgcctgggaactcggttttaatctggtgattgccgaagatgcctgtagcgccgctagcgccgagcagcacaataacagcattaatcatatctacccgcgcatcgcccgtgtgcgtagcgttgaagagatcctcaacgcgttatgatttacatcggtttgccacaatggtcgcatcctaaatgggtgcggttggggatcaccagccttgaagagtatgcccgccactttaactgcgtgacgcgggcattttaaaaatcactaaagaacgcccaagagcatgtgttttctttagtttattcaatgcattaaaaaatagtttcgcatgaaattcggtaaacttcatgtgtgcaataatgtcccattcatgccccaaaatgccccaaagcagacatttttgccccaagtatgccccacaagtcacgtcttcaagtcgtctatatccatagcacaccgagttacattcttgcatccggggtgtcgacaatacctactttattgagtgtgcgagaattaccaggaacctttccacaatgtagtagtctaatagtcgaatccatctaacattaagaagcgttatgatcactagcctctcattgatatcttctgtaatagtcactctatgtatcatggtgttcgctacagtaaaggtagggattggtttgtctaacaatccagacagaaatgataattaacctcaaccacgtaaccacacttcatacttcatacttcacttaacagtgaagtgctcacatcaccgggcagtcatcaaactccgcattcctggcatcattaatgatgtacgtgatcactccaaatatagcgggtgcagaactgtaaccatcatcatctgctggcagcgcttcccttctcccgttatccagattaaccaggtgcggctgaggatgagtccgatatcgcttgatcctgaattccccgtcgattgcacatatcagcagtgaaccatcgcaggcagtaagtgacgcatccacaacaagcaacgctccctggattatcccttccctgaaatgtgaacgcgatgcccgcatgaaataagtcgctgcgggctgactgattagctgctgatcgagggagattcgtgtttcaacataatctgccgcaggtgaaggaaatcccatgtttacgccctctcttgaataccggataaaaacacagtataaatactgtatatccatccagcaaagaggcaatgagcaatgttcgtggaactcgtttatgacaaaaggaattttgatggtctgcccggtgcaaaagatatcattctgggcgagttaactaagagagttcaccggatcttccccgatgctgatgttcgggttaaaccgatgatgacactgccggcgatcaacactgacgccagcaagcatgagaaggaacagataagccgtactgttcaggaaatgtttgaagaggctgaattctggttagtgagtgagtaaagattttcaatgcccgccacagttacgtattgattatgctgtggaggatattcattttcgtaaacgttggtttgggagaagcggcaaaacggaatgtgggaacaggggaaaatcagataccagatatgtctgcatttccatctggcaataactggtttcagttaccaagtggacatatcgttcagatattttccatgaacgttcttggtgcagatgctaatggcacgtcagctaattaccccattgcttttccaacaacgatgattgctgtcagtgctctatggtctgatgggactgtagcaaatgcaccgacatacaagatgatggggaacacgactaacagaacaactttgacgataaaagtatcagccagctcaggtacttacgggacaatgattattgcggtgggacgataatatgaataaatacagttactctccttcagaaaatgccttttatgctgttgcgttaaaaaatacctatgaattgagtggcacatggccagctgatgcattagatattcctgatgacatttctgtaaaatatatggcggaaccgccacaagggaaaatccgagttgcaggggaaaatggttttcccacatgggctgaaatacctccaccatcacatgaggaacttattgaacaggccgaatcagagaggcaattattgattaaccaggccaacgaatacatgaacagtaaacaatggcccggtaaagccgctattggtcgtctgaaaggcgaggaactggcacaatataattcgtggctggattatctggacgcactggaactggtcgatacttccggtacgcccgatattgaatggcctacgcctccggcagttcaggccagatgacatccggcgcggtgctggtatctgttgcagtcaccgcgtcaatgtaatccagcacggcgttaagtcgggttgtttctgcctgagtcagtttccgtccggcctgtaatttcagctgaatcagactaatggaagccattgctgcatcaatcagtgattggcgctgtgcttctgccgcttctactgaggcaccgtgttgtgcctcagtatctgtcacccatttctcaccatcccatttatcatatggcgttaacggtgaaagcgtgacataaccgtttttgatggcaccgatataatccactgtaacagctgcgccattttcgattgagtaaacagtctcattgcgatggtcttcctcatggctccatcccttacctgtaaatactgccactcttcccggaatgttttcgtccgggtcaataccagtggaacaggcgggcatacttacgccagtattaatatattcatcagaccagcccgtatattcagacgttactgcatcataataaaaacaacgcatatcacccggcactgcagccagcccattttcatcaaaaacaggtttcattatttagccctcaccagaaagttaaatgcaatatttcgcggtctgacagcaacaaaattcacaccatcacccacagagttactgttgaaattaaatcgtgaaaatcctggctgatttccggcgatgccatcatgaaagttaattgcgtgtccagcacctccgcctatattcccggcaaactgagaaaagtttgtagcttcctgccagcttaataattcgcgaccaccatctgcacctcgcccgtcatcccagacacgaatgaaatcaccgcgggcttcaggtaataccagcgaaggaaacactttcgccagcacaggataatcagtggcagagaatttcgcgccgttgaacttcaaaaacaccatactggaccagctgtcgattacagtatttggcattgcagcggacggccagaagaacggaacgccaatagctggagaaccttctcccaaaccaaggtttgtgcgagcgtctgcggcattcgttgcgccggttccgccgtctgcgacagtaaccgcaccgttgctccctttctgcgcaagtttaccgatgcctgggatggttacggcggtgccgttgatggtaactgtgatgctttggtttgctgaggtggtggcgaacgtctcccacgcgccaatattctcgtcgtactctttgatgagctgtgacatggcctgcgccaggccgtcgactgagatattgtccgacacaaggattccatacttctggccgctcagcgccggggaaactgctggcgtaaccgtcattgacgtggcgctgttcacggatgaaatctgaaacagctgcaccgggttagacatcacgataatcgtctggccagcgcggacctggctggcgggagctgtccagtttgtgccggagccggttgcggtatttccgttaatagagatagttccggtgctataaatcataacaactcctaaatttagacaacatgaagcccggagaggtatataaccctcaccagaaataatttctgaattggtttttaatacatgttgggcaacgccagtgttggcatagctatagttgtatcaaatgccattgaccacccacccaaataataattgccgactactttattcctttctgctctgacattcccacctgtcattacaattcctttatacctaatatttccgtaaccaccaacgtgtcgacagttagccccggtataaacaatctggcaaaattcatcaccaatattcaggttcgcattggcgatatttattgtcccatcaaaaatgaatggcttcgtgcaagtaagaagacgtttgcgttgacgattggtttattcaatccatcaactaaaatatcatgtaaacgaattgccataacatttcccactttattttacttactcaacacaacaagtatattaaaattgaaccttgtcaacaacacaaaggagtcccaatgaaactcgctctaattatgctgccattatgtctgtccctcactgcatgtggtaatggtttaaataccggtaaaccaaattccggtgtcattccaaaacctttggatcgagatggtaacggttctttaatttatgataccgaaaaccttccaatgacggggcagtggtgtcacgagattgatcacgaataccgacgaatcggtagcccttctaactgtgttatagactactaaatattaacccctcaaaagaggggttaatattttaacctgtgaatgaaccagatccgtgtgatactatgatagtaggcgaagaaattgacgcacccctgttattttgagcggacactttaatacgcactgttacgtttggacctgttacaaccgcagaatgcatgataagtctctccatgtcttgcacggatgaaccactctcattgccgttaatgtcgattgttcctgcaccattacctttaacgtttgctataacacagacgtgtcttgcgtgcccagaactggatgaatcattataagtcattaccttttctaaatatccgtcactagaccgactcacattcgtccctgtgtgcatatttgcaatgtccccgataaaactttgggcttccacagtccctttgaatttaccgcttgttgcttggatctcaccagtaaagctaccgccactagcatatactacacctctgacggtcacattgttgaattcagcatctccagctttattcaacttccaaccagcagaaccagctgcatagttgttggactggatatagttaccgatttttgcgttctcaatggtgccgtcctggatgaagctggcccggatgaatgtctgcccgttctggatcacgaacggcaaagctacgctatttccggctgccgtggtgacggcgaagcggtcagccaggaagataacctgcgactgcatgccggatggcgtattctccacgccgatacccatccccgcggcgtaatactgcccgttgctggagacaccaaccttgatgttgtacatcgcgctgagttcgccattaacgttggctatagcctgagcgttagtggtgatggcggaggtatgcccgttcacggtcgccgtgatgccgtttatctgcgtggcggtggcctgctgatagtcggagagcgtctgattcaggctgttgatggatgccttgttgccgttgacgtccgtctgcaggctcagcaatgaacgtgctgtggcttccttctcactgacgatcacctcgtcgagacggtccagattcgcgctgttgccggcgaccgatgcagaaagggttttacgcgtggccacctgagcgaggttggcctggattatcgcaattgcagagttcttcaccccgcccgtcatgccgtccatagaaacgctgatgttgtcgattcgctggcccagggcggtatcagccgtcgcaacggtctgctcaagctgactgagtgaagacgaaacattcccgaccgtgctggaaagctcattaacgctggtctgaaccttcccgacgtcctgggcatttttggcgatatctttcgcttgctgctccagttcgtcgttggcctgtttgatatcgttagccatgccagcaattttttcgttgctgtccaccgcgttctcgatcaggtctttgaacgtttccgactctttcatatcctccagaatgtcattagttatttcgctgacatctatcgaggacgtgcccatgatccagtcggtccagtccccggcgttaccgatacggtcaatcaggcgcgcgcggtaccactggcgaacgccggcaggcatggggccatgctgataatctgcagccgggtacggcaccaggaccagcagttcaggattggcgtagtcggcagttgtggcgcgctgaatctctgtataggccgtgtcgcctgagccatccggaaatttccaggtcaggtcgatatgccagaccacatcttcggtcgccaggaagttgagcggagtacccggttttcccgttttaccggagagataagttgtttcaccgtatccccatggtgacgacgtatcctgcgcattcagcgcccgtacgcgcacgtcatagctgcccgaataaatgccctgaaccgagaaaccctgcgcgctggtaaccggaacgtttatccagtccccgttgtccttacgccactgggcaacataccggattgcgccctctaccttatcccatgacacgtccaggcttgctacagtcagcccctgagacacatgatcgctctcagtcaccacgatattcttcggagcagacaggacgcttatcggcgtgacggtgatcgggggagactcgacccgaacgccgtcatcgatgtaacgatatttgtttggatcgtgctgaacggccgtaatagtgaaaccgcctgtactgtcgtcgttagccgcgattgaggtgaccctgaagtactgtattgcgaggttatcactgtctatcgcccaaacagcgcccgccacaggaacctgactgaatgccgtagccaccgtcaccgtttttttatcggcgctcaccgcgctgattgtccgcgtctgggcttttccgtcgggaaggttaaccaccagccggtctttcgccgcgtagtctatttctcgatcgagggtaatttggcggccgttggccgcgcttatacggcccccgttctccttaccagagcggaaaggatcggcgacaccgataatttcagcgggcaaagggatataaccgtccagccccacgccaaacgatacggtcccgtctttggcattggagagcaatacccagcgaccgcgtcggtgcgcttcactttgcgaggtgcagccgattgcggtcagggacgtctgccggacgtcgtaacgttctacaagcgccgaatcgtaaaccccctcaacggtatcgctgtaatggttctgcggatcggaccaggacaccaggcaggagctgtagcgattcttgtatgagccgcccgcataagtaaacagcccatcgataacgtttgagacgttataaacccagtcaacatcgtcctgcgggacgtctgcctggacataaatctgatcgtttccccagaacgttattccacgaaataccgcggcgagatcgttaagtacctgccaggcgtcctcctggctctgaatgaaaacgttgcaggtgaaacgcggttcggtgccaccggccccgtcggaaaccatttcgtcacagtactgggcgattgaatacagcgcccacttatccaccatggacgcatccacgcgcgtgcccatgccgtaaatttcatccagaaccagatcgtaaaagatccaggcagggttattggaccatgccattttgaacccgccggaccatgaaccagaataggttcgggttttcggatcgtaattatccggaaccttaatcagcttgccttttatcttacaggtcactttcggcgcgctgccgttgaattggctgctgtccacttcgacatacaggagcgctgttaaaggataacgaagcttgctgtcgatgacttccgcatacgaaaacaccttgaaggcgttaaccagtttcgaatttgatccgctggcatcagccgtaatacgcctgaccctgacagaccagccggacgtggattttggcagatcgatacggtggtcacgctgatattccgtcgtggtctttccgtcaaacttgccgtttacaaccgttttccaggcgccgccgtccgttgataaatcgatcgcatactcggtgaccgtgcccaccatatcgccattatctttatagagatactggaccggaaggctgagcttgatacggatggcatccagggaaaggtttgtaaactggcgcgtccagggcgcggtggtggtgacagttgtgcccacggccagctcgttgtcgacctggggcatcccggcaatataggtctggtcctgtgtgcccttgcggaactcccatttcacgccgctgaagttgtattccccgctgtcgtttgccagcggcgtatcgttgagaaaaatgttctgagcggtcaggtcgccctgtatttccccctcagaaacggcaatgagcatttttaattttgcgaccgacagcagatcgtcaggctgctcaaccggagtatgtgaactgccacctccccctttggcaccctgcaggatggtttcttgtttaagaagctgcattttttcacccataaaaaaaggtgccgaagcacctttaagttagtggccgctggcctactgctgatcgctcgagtacataccggcgctgactatcgctccccctgcctcagtcagaccgtaggccagggggacaggatgccccatagcgacggtattgaccggcgccccgaaggcgtagttaggcgtgttgtccgtgctggaggatttacccgcgccgaaggatggctggggcgtgagcatctggacaacgccccccagcatcatcgacactccgacccctgtcagaattgacgtggcgctgatagctgttgcactcatcgccgcgccccaggctgccatgctcgcaccagcggtaaagaatgcagcgaccagcgcaacagccccgacaactatctgcaggacgcccgaacttttggccccctcataaacgggcacgatccggtacacgcttccaccgcgggtcatatcaaactcttccagcccgatattgttgccaccgttaaaaaaggcgaaacggatccccttcatatgagcttcagacatatattttttgaatccgggaacctgtgaacacatggccctgagcatctcgcgcaggtcggcaacatcaaactgaacgcgtttaccgaatttttttgccattttaccttcgagaataagcgtcttaaccatgcattctgtccttatgcctgaccacccggaccgttctgtcgcgataatattttccataaggcgttcgcgaagaaaggtgcccgaaaagatgatggagaatgatgttatcacccacatataccgcggcgtgattagtcaccgatgcctgcacactcatcatgatgatatctccgggctgcattgcaccggcggcaatctcaacgaatccctcacgctcccagttgtcgtcgtagagacgctccttgccgctctcccaccattcgtaaggtactgaataattgccgagaacaatgccgtattcgcgcagataaaattcacggataagcgaccagcagtcggcgtaacccagcacccactgccgcccggcataatcccggtcttcacgcggggaaatcgtacaaaaatccccgtccggccaggacatgatcccccactcaatccccgaccagtcgcactggatccggtccagctctgagggcaccagccgaaccacatccggatgggaatgaatgagcatgatgatctcaccgcgcgcgcgggcagcgagctggtcttccggggagagcgtgaatgtctcctcgggtttatcggcaatgttgcggcagggaataaagatttgttgctggcctgactgaacaatcaggccgcaggcttctttggggtattcagcagcgacgtgctgacggatagcatccagcaatttttcacgcatttttatttcccctgcaggtttgcagccggaaaaccgccgaacggcagcggcgcatccgggccgtgacgatcctgacaatcctgccggcggccgccacaaacatctttcgacgggtcatcggtcggtgtaccgtctttggtaaagtatttcgtgccgttgtaatcgcatccggtcccgcttcggtaccagccccgcatacaccaggtgcagacaggcgtaatctgccgtgtcggcagctgcaggctctgaatatcgaaaggagaacacagctcgaaatcaacctgtacccgcgtctctgcggttttagcattgacgtaaaagagctgtaagcgctcatcggccgggctggcacccggattaccgtttttccagttggcggcatcgagatacttcgaaagcgtggtatggattttgaccttagccctgaccatatcgtcatattcaagacacagcgcggtgacatagtttccgacgttcccgacggacagcgtgggcgttggctgggaacctgtactcgataactccatccccttaagttcgtagggatggggatcgtactggtttccctgccagataatggcgggcagattttctgcggcgaaggctgcccacccctcttcctgaatattgtgcgcatgaaaacgcagcacctgatccataccgaattcagtgccgtcgatctcaatcagctgaataacgctgccgggctcaagctgttgtatgtctgccgtaaaactcatactccccccataaaaaaaagccgcccggaggcagctttcagtgtttttcgagaaaatcagggcgcgaacgcctgttcaaaagtgaaggccacagtggcttttttcccggtagggaaagaaacgctgaacgaatcggccttcattctgaacagctttttttcaccccatggagtggtccaccagaacgatttagtaacgtgagacatcaggaaagcgcgcagcgcagccgcctcctgtctggtgcccgtccagtccaggttccacgtttcctgtttgtcgttgatccccatccccgctatctgtttgtagccatccccgaactgggcctgcagcgttcgggctgtttcagtgccctgcgctgtttttcgcgtgcgccaggtaaacgtgtccgtcactgtgtcctcctcgaataaagcacgccgcccgcggacatttcttttttcagtcgctcggtgattgtctgctgaacaatcgcctgcagctgtttcgccgtccccgtggcgttcgcctgatttatgcttccgtcactcccctgctggctgatgctgactggggcataaacactgatcccgcccatgccagcaccggctgcgttcccgccgccgaccagaccacccgaggcatacccgcgcatcaggcgatagagattagccacgccgatgcggctggttgattctttggtgaagacgaattccccgcggtgaacgataccggctggctcgtacttgccgccgtgcccggtaaaaccgcccacgtcaaaaccctgtggccggtatgacgggaccgcgaatgactgaccggcagaggaggttttcgccccgccgctaacccagcccattgcactctggatggtgtaagccaccagcagctggttgataacggacacaatcattttaaggatcgagctggtgaattccctgaagctcgccttcccggttgtcgtcaggctggtaagctggcccgccaacccgctgaacgtagcctgagaaatctgctgaacggagctgaaaacgtttgtcgctgaatcctgatattcggcccaaccctgtttcgcaccggccagccagtttgcacgcagggcatcttcagcttcgaacgtcgccctttgctcttccagaaccttttgctgcgcctgagggttgtacgaatagctttcgctgagacgctgcagcgtagtttgtcgcccggcttcccgggtggataacccctcagactgagcctgcaggcccgccctggcggctttttgctgctgctcaaacttcacggcctgatcggccagctggttgagcttttgctggctggcaaccttatcgcccaggtcggccagctgccgcttgtactcgagcgtttcttctttgtgcgccagcagggatttttcctgcgccgtaagctgacgacgcccagcggcctcctgcagaacggtgaactgattttcagtttgccagagatcctgacgctgtttacttatgacgtcgttcacgctggtatgctgctcaagcgttttaagctgggcctgaagggtgagaagttcggcctgcgccttttcctcggctttgtccccggcgggcgttgagtagcttttgcctttcggtgtttttggatccttccactgcttttcaatcccggcgcgggccgcggcaatgtccttttcagtccacagcgtggcgacaccgtctttcgcatcctggcggtttttctcaataagctgactgagctttttctctgctgaagcccgcttttctgccgccgtcgcgccggactccaccagctggttaaactgctgctggctgcggattgcctgagcctgctggtccgttcgcattttttcccgcgcggctgccagcccttcctgggcgtattgctgatcggcaagatcgtaagcctgctttttcagctccacctgctggcgcgcgtttctcagcctttccgcatccgctttctgcagaacgttgttaccggcataatccgggtcgaccttaagattgctggacagcgcgcggtactctttctctgctgcctgccactcagcaaaagagtcctggcgcttcatcgcggtgtcaggattacgcccgacgcccagcatcgcatcccacgcaccggaggcggcattcttcacccagttccaggctttttcgagggatccgagattatcctcgaccgcaccggcgcgctgaatgaccgcgtcggaatatgcccgcatggccagctcggcagccttctgagaatcccccagcgcctgagcagaagctatctgttcatactgggtggctgtcagaaaatgaagggaatcgttgagcgtcgcgaccgcgttaaccggatcatccttcaggcgtttaaactgatttatggtttcgtcaacggcctgcccggtagcctgctgcagcctggcggcaacattgctgaccatgctgacgtcattaccgctgaacgcgccgctgccaacgacctgcgccagcacgcctgcagcggcatgctgagtgatgccattacctgccagcgagcgcgccagcgcctgcagctgccctgacgttttccccgcgtagttcccggtcaggatcagctgcctgttaaattcctcagactctttgctgccgtcgtaccaggccttacccaacccgaataccgccgcggcaatccctccgaccatgctggcgatcccaagaccgcgcagtgacagaagctggtctatccaccctgcccggttagccagcgtgatcccggagccgcgcagcgcgccgaagttaccgcgcatgacctcgccgatcagtattcccagttcctgccgggcggcggcactttgcagccccagaccgtgcgtggcgactttggcagcttcgagcttgcggatatagacttcagccgcatcgctggcaccgacctgcgccgccttcatgcgcagtagctcggtaccggagagcttttgctctgcaacctgttgcttcagctggctgaggaatcgcgtgcgcgctgcggccgatttttcctccacgatctgcagttctttttgacgggccgtggtgcgggaaataagggcgagataatcctgctgggttatgttgccctgtgccctcgctgcgcgaaagcgcgcctgcacgttcgcaagcgactgtgtttcaccattgagctggcgtacgccgtcgatctggcggaaaaatgatgccgcaagttcatcctgtcgacgggcaagcgcagcggcctgcccgtcattctcacgcatgcgctgattaagctcggtcacgcggcggtgagtttcatcaacggactttgaaacgttctgccagtctttggtaagcccttccgttgcggccgactggcgggatttcatatctgcggcagccgccgcgccagcgtcacccacggttttaaacgcagccgcctgccgctctgaagcgcgctgcattcgcgtctggactttttcagagtcctcagccatcccggttagctggccctttatgcgggcaacctgctcactaaacgtggcgctgtcgacgtcaaggttgatgaccagatcgctaatctgctgggccatatcggatacctcctgttatcccctcagctgcggccatcagcgcatcatcatccggctcgtcatcgctgatgacgataccggaaggagaaagcaggctgaaatgtgcgggggtaagttccgggtcgcggaagaaaagagtggagatggaataaagcagctctgagaaatgcgcatcgagctgagcgtcctgaaaataatgctcccggtagaactggtgccagtcgcccagctcagtggaagtcattccagccagcatggcgcgccagtcgggtcgcccgaactcgcgcgccagattcaggacaaacttcagctcgctggcaagggcttttccgccgcaacgggttctgcgctttcggcctccgctggggcatccggatcggcagctttgtcatcctcaaccggaacgagcatgccggagagcagctttatttccatttctgctttaccgatcgcctccggcggccagccgctaagcacctgctggtaaagcgtctccacatccgtgccagccggatcgttatgccacaaagacatcgcaatcaaacgcgcaccgcagcgaatatttgagccaatcagcctggccgtcatttcctgatcgctgatgccgtcgctgtcagcgctgacggccttttcctctgcggccataaacgtgatgtactcaatacgctgaagcgccgacagctcgaagatggtcagtgattctttttgccaggtgaacttctcttttttcagaaacatgcgtccttccttacgctgcagttacggtaactttgcagaccgcaacgaaattaccgtcgctggtcataacaataacgtcagcggtgcctgccgccacgccggtgacggtgatcgcattaccgctaacggtgaccgttgcttttgccccgtctgaggttgccacacggaacgaggtatctgaggcactggctgggttaaccgtcacattgagcgttgtggttgcgccgacggccacgcttgccgtggctttatcgagcgtaacgcctgtcacggggatattcggggtcccgctttcttctgccagttccggcttgccggtattggtaattttcgctgtacgggttatgacctcttttgccggaatggctttacccaggctgctgcaccagccgcggaaaacgtcgacggtaccgttcgggtatttgattttgtaatagcgtactgagccatcaataaaccatgcgacaaggtctttttgcccttcttcgcccggcttccaggcgagggtgaacgaggtatcgccagcagattttgccccctgggccgtcgcgttccagtcggcatcctcgtcgtcgaggtaagtgtcgtcatacgattcggcggtcatttcgcccggcgtcagctctttaattttcgccaggcggttccagtcgatatccgagagtgggttagcgaaagcgttgcccgttccggtgtaaagccagagggtggtaccggcacctttcacaggggccagcgggtttggagtaggcataagtacctcttaaattgaataggtgattaagtacgtgaaatcgactgaaccccaggtggccatttcatcatcccgctgatagtcataaccctgcggggtgaacgtctcgaccagttcggtcagacctgggatgaaggccattgccggatacactttctcttccatccaggaatcaagcgcgctgtcggggctggaggctttaagaaatacctcgatgtgaacaaccgcctgccacgaatcttcgtcaagcgaatcgccggtgtactccgcgtcagaaaggtatacagccacggcagggagatcctgctcttcaagaaaaacagggcgcccgtcaaaccaggtgaccgtgtcggtgatctcggctttcagtttggccagaatggctgcacgaattgcgctgtgtctgttcatcgcttcaggtggatcctcagttggtttttcagggctgcggaaagttctttgggcatatcgctttcaataaggcgctttgaaatagcggtgaaggccacggtgagcggtgtctcaagaggaactttgaccacatcaatcggataacgggcctgacctacgcgccgcatgacctgccagcgcccgttcgcaagctgttggataaaagcgttacgaaaggtatagggcccgattttaaggacgctgcccgctccgtttctggccccttttttacgcgagagcctgacgcgcgccgtgccgagctttatcgcaggaagattaccgcggttgatttttatcgacgcgaccgggcgatcgtgacgggccttgcgcagacgggaacgctggcggaccagacgaaccggaagcccctttttccggttatcatcaactgttgcttctttcgctacagctttgctcccctggcttatcgttcttctggccaccctgttaagtgcttttgcggttgcctcaggaacgattaaccggctgaggctgttcaggttctgaatagccctttccagtcctttcacagacatagcgcctcctcattcgagatggatgcggggttttccgttgaacatgtcatagcgggtaacgatcaggttcttaccgtcgtagtcgacgctgtcgtttcggcgtggctggtaaagctcagagaaaaccaccagcgaagtacctgttcccgacaatggccccatttcctcgagttgctcggcgggaacaacgtcatagctgctgccattgatgatcgctgtctttcccatcttttttatagtggccgcgtccatgcgcgccgccatccggtcaaaggagttaggcattgatcttaacttcaacaacggtggtgtttgcccctgcatcttcccaggcgatgcccgcggcaacggcgtccgtttcttcgatcgtgattttgccgtccttcagatacacctgcgccccggcagtaaccgcatctgcggatacttttggcaggaggaaaacaccctcagtaaaaccgtccccggtatcgccagccgggatatcggtaattgccaccgcgataagttttccaacaacaaccgggtcgccgctgtgaacatcggttgcaccactgtttaccagagggatcgttttcccgtcctgcgcatagttcttagccataacttctccattcagcccctttcgaggctggtttcaggtataaaaaaagcccttacgggcgtctgtttgtcaggactgttttttactgaccagaggatttggtcatgccgcgatagtccagcggcgccacgccagcatcaatacgcactttcgtggcgataccatcagtggtgaagccttcctgctgatcgatgtatggcgtgtcgacgccgttgagataagcgacctcaatggtgtcggtgcccttcgcggcagccagataccaggctttcgcatcagcttcatccagacgtggttcggcaatgacttctgcaaagttctggatagggttaacgatcccggcattgatgtctgcacctttaacactggccgacttgatggtctgatttgccagagtttccagggcgacgggcaccagcatgtaggccggacggatattcagggttcgctccccctccttctgcagacgcatcagcttgcgcgattcgtccaggctggccacagaaattgcacccgagctcaggttcttgtgatcggcatggaacagcgcctttccgtctgagagtttcgggtttttggtcagaatggcgtaaaccagatcgccaatcgttgctttcgccgcgcgccccatcttcatcggtacgtcggtaagctggttcagatcgtcgttgatgatcgcctggcgagttactgagaagatttcaccatacgtggcaagcgcgatggtttcgcctttgtcactggtagtgatgtacttgtactcagccccttcgcgaacctgtcgcagagaagggaacccacccataccgacacgatgcgccgttttgaagtccgacagctggccttttttggtccactgctcgaaggtttcctgcgcctcgtcccagccctgaatcagcgctttgttcgcaacatcaagcagaatgttgccaaagtcagaggtgctgtgggtcagcgccaggccaaccatctgcatcgggttgtagctggccacgccgatacctttttctgtcagggccatacgcgcatactcgcgcagcgtcataccgttataaacgttatcccgctcctgaccttcgaacccggcacgcgccatcagtgcctggcgaataccatccgcgacgaagttaccgttgcccgcatgaatatgcggctgagtggttttattggacggcgtggccgttttaccgagttctgccagcagcaaatctttcgccttatcgacggagcaatcagggtcggccacacactgattctgcagttccatgtgcttattaccgaacatggcaaagagatcgccgatagcgttaacacgggttttctgctcagccaacacctgcgcgcggatcgcattttcatccggtgccgggtctgtttttgcctgcggtgcctgaggctgggtaataaccgggtcacgctgggtagtgttgcgcggcggggtgatcatgttgcgaatgctttttggcattttttcaaattcctcaatacgttttgaatgaatacaggccatagcctgaagggatggtgtcacctggtcggcaaaacccagttcaaggcactcgctgccgttcatccaggtttcgtcctccagcattaccgcaatttcttcggtggattttccggttttctgtgcataagccgggataagaacggattcaaccttgtcgagaagatccgcatagtcgcgcatatcgctcgcgtcaccaccagcaaacccccagggcttatggatcatcatcatcgtgttttcaggcatgatgaccggattgcctaccatcgcaatcaccgaggccatggaggccgccagaccgtcgatatgtacggtaatcgccgcgccgtggtgcttcagcgcgttataaatagcaattccgtcgaagacatcaccaccgggcgagttgatataaaggttgatgtgggtgacgtccccaagtgcccggagatcattgacgaactgtttcgccgttacgccccagtacccgatttcgtcataaataaaaatgtcggcctcactgttattgctggcctgcatgcggaaccacgaattactttttgcgctggctttcggacggtggcgcgcccggttctttggcttcggcactggtgcctcctttatcattggcggggtcggtgtcaaacaccaggccctgttcacggttctcgtcaacctcagctttacggcgtgacttaacatcatccgggttgcgaccgctggcacgtatccagtcggattcagtagcagcaccgccgcggatctgcgttttccaggcattcgcttctttaacgggatcaatccacggcataacgggccccgaataaaccgcgttataaagcgagtccatatcaatgcctctcggcagcttgatttctccggcagcaatagccatcttgagccaggctcggtacatgggccgggtcactgaaccgatgaaccagtcctgaagaatcagatagccgtcggttgactcgacaagctcctgccgctgggcactgtacgttccgttgtagtttctggatgtgctggaaaagctgaggcgactgccggcggacacggcacgcagctgtccgttacgaaaagattcgaggttagggttcgggcgatcggatttaatcatcccgatttcttccccggcctgcagttcgtcatagagcataccgggctgaatcatcagctcgcggtcatcgctgcttgaatcagaatcgaagctctgtccgtcgccttttttgatatacatgccgagtgccgcagcaattctggcagcagtaagctccgagtcctcgtattctttcagcgcgctcagacgcatcagaacaccagacaaaagagacgttccgcgggtctggtgcaggcgtcgggtgaatttgagatgcagcatgttctctgcatctatctctttggtatcaaactgacgcccggatactggcaggcttttatagacctgatattttttcgggcgtccccagttatcgacaaaaacgccctgattgagctgggtggcagcatcgctgttcatcggcacaaagtccggctccagcgcttccagccagaacggcacgccagcaaccggctgaagaccatttccggtaccgcgaaccagctgagcaaatacctcaccgtcccggagccacgttcgcagcatcagccgctccagcattgggcgggtaaactgggttgtgacatctggccttacggaccattcgccccactttcggcggatatcagtggccagctttttagcgatcttcccgttactcagcatcggatgcggttcaactatgatgcccttcgcacccaccaccctttcttccagcttgtcgaaaacgccgatcaccagatcgtggttgttatccagccagcgcgcctgctgcctcagcgaaaccgcccccatctggctgagctgatcggctgaacgattttccttctgggctttgtgggtacgcgtttgctttaccgcctcatacgctttaataactgcgcgggcacgcaggcgtgaggctttccagcctggtgaaaacaggccaatcgcatcatctaaaaaactcatccaaacctcgccagcctgtagccgggtcgcccacggcgtttgttattgagcgttgccagtcgtcgctcccattcctgacggccttttctgatttccgacaggttttcgagcgtcatctgctgcccgttgaaagtgattgatttcccctccagaacagacagctcggctgcagcatagcggtcgatcatgttttgaatatctgctggattcacacccaacctcctgacgaagaccacggattagcctgctcggttacgggcttctcacgttttggttttggtttagatttcggcgcaggcggcggggatggcatttcgccagcttccgtctgcgtgtcctcgatccacgtttcccgccgtgcccactcaggagctgacggccatttgattttttcgtaaccactaaggatggcgagcgcgtcggcataaacgagcaggtcaaatgcttcgtttgcgccccggccgggcttactccatttcccttcattcgagcgttcctcatacgtcagttcgtcatagaaccagctgcccagccaggcggggaaatgcacatagccagggccgggtgaatcacgccacagcgcattattcacccggtctttaagggcatcggtctggagaagataaagaggcacatcaccagtcgcctgtgcgcggcgcgttgatctgcccgtgttgtcgggaaacgttcgctggataagtttgctgcgcctgacgctgtcccctttgaagagatagatacgcttacccagcccctcacggcgacatctgcgccagaacttgtaggcattatccgtcacgccatcttcgccccctgagtccacggccatcgacatcagccgcatgccctttgatgggtcagctgcgagcggccacgttttatcaaagacgtcagtgagtaaaagatcccagtcctccggatagctcgccggatccacctgaatgctttcaccgttgccgtcgcagcgcagcgaatgccggatgttgtaacggtcaactatccagcgctcacccatacttccataacccgtaatctgcacaacaaagcgccggttgcgcccggcctgcacgtccacggtcgcagtgagaaactgcacgccgttcggtaccgaacgttttgggacgtcttcggcacgctgctcgagcaattcacttttacgctgctccatgctggctcgcggcaaatagggcctgccgaaatcggtgttgatcaccgtcttcagggtttcttcgctgcgcgtggattcatattcctgctcggcggtcagaaacttataaataagctgcgcccaggtctggtaagcagctgccggaccttccatccagaaggaggcaatacgggaacgacggccatcaccgctaaccaggcctttcctgtcgatggtttgcccgtcccggagccagacacatttcatgttaagcgcacgcttcatgtccggtgtgatcctgcctttacaggcagggcactgaagaaacgccgcttcgctggcaagcacaggatcgctgctgtcgcggtatccggtcatattgtccatttccggctggaaatattcgccgcaatgcgggcatggccagtaaagacgacggcggtcaccacggttatagagcgataaaattccggtggtcggaggggcttcatggggcgtggagcgccgccattttgtgtctctgatatccctcccgggcgagctctcaaccagcgtcatcccggaggacatgaatgtcgtggttcgtttcgatgccagtgaaaaagcatccccctccccgtcgatatcttccggaaagcggtcataatccgtcagcgccacacttttatagtccgaggacgacatgatattgacggatggccagcccagcttcagatagttaccggcgcggaatgtacggtcgtagacgttgttatcgttacgtcttgggcttagccgggttttaacttcagggctacagcgaaaagtacggtccaggcgttttttggaatgctcgcgcgctttttcctcagatacctgaattacaagcatatctgccggatcgcagacaatgttataaacgatccagccgtcaatcagcccgatggttttacccgttcgcgctgggcccacaaacacaaccgcatcgtattcacgcgatgccagacagttcatcggctcaatcacatagggtgccagatccggatcccacggaactgagtttcccgcccccattggcacgcgcatataagtactgaccgcatcggccaccggcatacgacgcggggctcgtaaaataccggaaacatcgcggcggatgtccctggcggatgcccgctttgccatcagtcctcctcaggctgctcctcctcttttccagcgtcctgcaccttctccgccatctggtcgcgcagatcatcgataacgctttgcacacgaactaccgcagcaggcgttaaagcacagtcgcgctcgagcacatccgggagggtttcaagtaccatgacgacggctttcgccatcaatgagaattctcgcgccacttcatctgcgggtattaactgccccgtatcctgttcgaacttcagcctctcgttctctgctttccagtgggacagcctgtcagaagggggcatatcgtcgatgttggccgaaacggtagggatcatcagttcggtcagaatgtcggtcaccagatagagctttaacttgctattgctgcctggagcaggttcaacatttttcagtctcgcggcaaccgtctgacggtgtacgccggttatccctgccagctggttgatattgagttttaaagtggcaatttcctggtccatgatggtgaacactttttgaacgattcgacatgttgcgaaaatggcctctaattaaatcaaagacctgcgcacatgatgatgatgaccctggatccgaaaaactagccgtttcccgcgagcacgccgccccgtggcagggtccccctccgggagtaccttttgataataattatcaattgcacactatcgacggcactgctgccagataacaccaccggggaaacattccatcatgatggccgtgcggacataggaagccagttcatccatcgctttcttgtctgctgccatttgctttgtgacatccagcgccgcacattcagcagcgtttttcagcgcgttttcgatcaacgtttcaatgttggtatcaacaccaggtttaactttgaacttatcggcactgacggttaccttgttctgcgctggctcatcacgctggataccaaggctgatgttgtagatattggtcaccggctgaggtgtttcgattgccgctgcgtggatagcaccatttgcgatagcggcgtccttgatgaatgacactccattgcgaataagttcgaaggagacggtgtcacgaatgcgctggtccagctcgtcgattgccttttgtgcagcagaggtatcaatctcaacgccaagcgtcatcgaagcgcaatattgctgctcaccaaaacgcgtattgaccaggtgttcaacggcaaatttctgcccttctgatgtcagaaaggtaaagtgattttctttctggtattcagttgctgtgtgtctggtttcagcaaaaccaagctcgcgcaattcggctgtgccagatttagaaggcagatcaccagacagcaacgcgccacggaaaaacagcgcataaagcacttcattagcagcgccagatagcgtaatgattttgttactcatggaatatttccttttaggcgtgagcctgtcgcacggcaatgccgcccgagaggtaaacgcaacctaacggcatcacccaggctcactactgaaagactctctttgatgtgcgcgtgcgatgcgcgtagaagactgatttatcaacctgtctttatatcaggattcattacctgactatttgtgggtaaagttcgtagtgcgctgatcgtgcaaaatgattttagttgggaacagttcgcaactctgtcccataaaaatcagcatattcccatctatcccatatccagcgcattgaccatcgggatactgaagggagattccatcatctcttagaaagatcaccatctcttttgtttcaatttgcatatagctacctggaggatttatgaatgcaaggattttcatggactattaccatgagattgattttccatctttattcgcgagagcagtggaaagcgatgacgatgtgggtactacattgcgcattcacctactttgtgagcgcatggtcgaagcatggatatgcgcatgctgtgactgccaagatctctttggaagagataaaaacaaacttttaatcgaatgtaatactaaaatatccatggcgggaaacctgggaatccccccggaacttatgaaatcacttaaaaccatcaactcaatgcgtaatgaccttgcacacaatccatcaatacaaagcattgctgattcaaggatccagagcctgaaggatactctgactgaatactttaaacagcatccaacggaacccagcatggaagaatcaaaactgggtatttttaacgccgagaatcaattaaccgaagaagtttccttagatagtgacagttcaaaaaacagacttaagttaatcttgctgttcagcaagttaatgcaggcgttaatgcaattagttgcagctaatcataatgggcgctgggataaccaatttagccaattcgtttaccatgtgaccatgaacgcaacaaagagataaatccaagcccgttttgtacgggctgttgcattatcacaggcactcagtgaatgcctgctgtaatgccgctagtcgtcgagttgcaacacaccgtgatccagtgattctgaataggcgataagtccggtataaccggggataatctcaccattatcagcttcaaattcaggaattgtgccggtggtgatggtgtattgaggctggccatcttccttcgcgaaggctgccaggtcttcaatctgcttagctgtaagaactactgtcatgctcattcctcagttgtaaaaaagccccgcgagtgcgaggcgatttgattgaattctcggctcttatctcagcgcagccccttactgcgtgccggttgctcggtgatgagcatcagcgatgagacattaaagccgaccgaaggccagcggcgttcctcatgttgccgacagagccatatcgacaagaggacgaaaactagcagcatgaatcgcctattggttattcgacagtcgcactgattcgtaaatccgctcacacgtcattcctgcccggtagctttcgtcagatcgtccagcataatatcgagctgcttctgcaaggcttccgagcatgtcggcaagcattgctgcgttggctccggctgttttgcttctgacggaagtggcgagatctgcggtgtgctttgcggcgtccatgtgggtagcgagttttgttgcttcggcgcgcagctgcttaacagtggtagccaggccagcagaagtaacggcagcgctcgctgcttgagcttgagcatctttaacggcctcatcccgggcgattgttcgcccttgttcaatcatacgagctgcggtctgtgcattcgcttcctgtgaagattccgcgctatcccggtcagcccactttattttccagctgcggttcgtccactcactgccagcgagaaacgaacctaccaacgcaacaatcacaatgatgcagatgccacccggcttcactggtctatcccccagcacgtcagtgcgctttcctggtcccgccgttctacctgcccataacatccatccttctggcccttggtcaggcggcaatcgcggccaccgtctttaatccaccagcggatagcttcacaggctcctttcgtatcgccagcattaattcgcttatagaacgtagacgggaaacattttccggggccgatgttatatgggcagaaagaagcgatacccgctttctgtggttcggtcagtggtactttgatatttcggtcaacccacgccagcgccttgtcgcgttcaatggcgtttacctgggcgcatttctcagctgacagcttcatgccctgtactactggcttgccatcaaccattgttgcaccacggcaaatggtccagagtccgccgccgtcgcgatatgctgtcaagctgttaccctctttctcatccagaaactgatcgagaatcacgggtgcggaagccccggcaagaatcaaaccaacgaccgctgcgctcaatttattcttcagctttagagacatagccattgcgccgatcctcccgttctttccagcggaaataccagttcactgcacaggtgattaccgtgcatgcgataccgacaataattgcccagtcgctcaggcttaaccctgcaattctgtcggccaacatccaggacacctcttttgctgttttagctgtttcggcatatgccttcgctgatacaccgcagccggcaagcgtggttcctgatccatatgaaagtctgctgtaaatggtgctcattctggtcatagcctcacctccgatagttcggatggcgctgtgtgtgattgaaggggatcaggcaaccgggctcttatgttcaagtaaaaattaaggatgattcccggtgcctgaagatggtgatcaccacagcaacgggggagcgtggtgatcgttatgattttttcagtttttccacctcttcggtggtctgtataaacctgtctgcctccagttctacgccgatcgcccgacggccaagttctattgcagctttcacagttgaaccagagcccataaagaaatcggcaacgatatcccccggtctgctgctggcgctaatgatctgtttcagcatgtcggcaggtttttcgcatggatgtttgcctggataaaactgaacaggcttatgtgtccatacgtcggtataaggaacaagagcggaaacagagaagcagcgccgaaggattttgtattcctccagcaattctgaatacttgcggtttaatgactggtaggtagccaccagctggtggtgaggatgttcaagcttttgctgaatatgtttatcgatggcgatccgcgtgaacagttcctgcaattttcgatagtccacttcattcggtagttgccattggcttgcaccaaaccagtgtgacgccatgtttttctttccggttgcctcagctatttctttcgagctgacacccagtgattcacgggcattacggaagtaatcaatcagcggcgtcataatgtgctgctttagctctgtgcttttcctttcgtaaacatcctctttacctgtatacggtccaagatagtgctcagcaaacaaaatccgttccgtagatggaaagtacgcacgcaggctttctttattacatccattccagcggcccgatggttttgcccaaatgatgtgattcaaaacgttgaatcgggcgcgcatcataatctctatatctgaggccagtcggtgaccgcaaaacaggtagatgctgccagcaggtttaagaacgcgagcatactcagccaggcagctatcaagccagcgtaagtagtcctcgtcccccttccattggttgtcccagccgttgggcttcactttgaagtacggaggatccgtaactataagatcaatagagttatccgggagggtggcgacgtaatgcagactatcagcgttgattaactcaacactgtttatttttacagtatttttcatagatcagtaagcgtaactctgataggctcacgttgcttttgcgctaaagcagtgggccttggttagcttgtgacctgaaagcatgagctgatggctggccgggtgcgctaacacccaccagccgcccatttccacagcagaaaacccccattactggaggcgtttataacatccgaactggtaatcagataaccccgccatcaccagctgcgtaagtatgagctggcaacgttcgtggctgaggtgggtattctgtgcaatctccccagccgttgctggtttatcgcttaattcattgaaaacagcctttgccgtttctgtcatatcttcctgatttagcatgtcttttacctaaaattagttgcgtgacatacagataactctggttggtgataccagcaagagaagaatttgattctgcaaccaacaaggcctttaggcatcaggcaggaatgagatgcaataaaaaaaccacccgaaggtggtcttatatgaatctttaacgcggacttagcaaatattccacatcatcgtactaccgttatggttttcgataatttttgcggctgggctagtaccaaaagagtgcatatagcaatgatgaatagtaaggaccagatcctgcaacgtttggtcactctctagctccatgatatttaaaccaatattttgagctttgtccaaatgaatatgtctggcatgtgcatacgttgcttggtggttgtttaactcatcacatatacgcttagccttagcttcagcgtcagcctgacctgcgaacataccagtacaaagccatttctggacaatttcgttcgcccagagaattgctttttcacactcgccaatcaacgttggatttagtttttggaacgtaaattgccaccattgcagtgcagcagggttggcaaaaatttccgcttttgctctctcatactcctcaataattgcatgagatgataacccattaaactgtggatcaattggccccaagttcgactgtttacctaaaacgatctgctcagcacaacaagcaagcattgtgccacaactcattgaaatcataggtacaatcgctcggatattggttccgaactttgaacgaagataatgaccaattgattctagagctgcgatatcgcctccaggagtatggagtaagatatccaatcccagactcgtatctaacccattgatagcagacataagaccatttttatcatcatctgacatctggatcagatgttgaaacccaggcccccctttttgaaggaagcctgagtaataagaaattacatttcggccagtatgtttcgataaatcacgtaagtacttgtggcgaacctcatccgctggtgtacgttgagcgatagtacccatctcacccaatacgtctatccaatttggcatgttatcaatttatcagtatgagtacagttggtgagattgctgaccgttctgctcagtagtatttggtgttactgtgctgtatgaatagagcacaccacttctcacattcagatcgttttgctgagcgagaacacgcatagcaaaatgctgtacggattcgcctttttgaaactcttggggttgtatgcccattttttcgtaaaattcagcagcgctcatgatatgtccctcgtttttttctacatctatgcaattccaggagccatcaacacaagatgtagtagttagcagtcgtcaaatacacgaaaagcctcaagatgaggcttaaaaagattctttttgataaagatttagccaaactatagcggtcaaaatgcagatttgacaagtataaaaagcacttaaagcctataaataggcagtttttgagaattaaagcatctttaatgaggttgaacaaaatgcagtcttgacgctgaacaggactttactggaacgtagagctaaatggttcgatttcatgaaccagttacaaaaaaacccgctcatcggcgggtttataaaactttggcaacatatcaaatatgcttcaaatatggcttattttgttgcattttgcaagcgtgtttgaaggagatggtgaaatttacttcacatttctgccactttgagggcttcttcttcctcatagtattcaagagccatggccaacgcagattcatcaagctgggtaaaagcggcctttaacccagcccagtgccctgaatagacacgcaaccatgtcgaacggtcaacgctaaccatgcgggccaacgctgcaccagcatagtctttataggtttcattatttctggttgcggcaatttcctgccctgccagccataccaggcctatcagtttctttactacgcgctcctgaagggagttatcacccaggcatttctgataagttttccagacgtattcacacatcatcacctggtgcttatagctaaggtcaaaaccgtagcagtaccgcaaccaggcctgctggtatccactaagcgcggacactgccctacgccacggcgcggactcaaattccgcatcttttatcggcggcattggcctgcggcggctgcgtgtttccagcacatacagtggcgcggaaagtgagttaacaaagcgtggccccttctctccttcgagttcgacgagatgaattccacggcgaggggtggcatttttgtctgctggtgggtgttcactgaaagcctcaagctgcccttttgttcccccagacaggtcaggtagcgcgcggcgcaattctattcttacaaaattcaggtcttgttgattcatgcttctttgcgctccatacacttaagctttcgcaattacgccgatcgccagcgcccgatccataaaacgcagtagcagctcaagctgcgtaccatgcttctgctcgaatgccggtacatcggcgtgtaactcgtcgtggcactctctgcacagagggatcacgaagagatcatgggcttttgttgctgtcccccccataccgtgccctacgatatggtgcggatcatctgctggccgtcggcaacactcacagggttgtgttttaacccagcgggtgtacgtctcatttatccagcggcgtcgctttggcctgagcatgaaagattctggagactccggatcaacagagagcgtgaggatcttcttcgccttctcctgcacgaggctggttgcagaagcggaaggcacaatgtcgctttccctcatgaccgagcggatcttatcatccggaaggcgtagccccttgtgcgcaacgctttccggaataacatcagccaggtcgtttctgaccatccaccagcacagttccggaagcgtcaggatatgcgactcgggaaaaccagaatcacgccgaatgacttccagaatccaggataccaggtttcctgccgctatacctgcaagctgttcggtatgctgccccgacaaagtgtgatcgcaatgccagcacaggcgaatacttcctggtgggtgccgcattgttgtgaagttcttgtcgtgccacgatgaatgtggccactggcattcaaaccgattactcaaccattgctcaagggaaggaagcccaccagcacgctgaataacccgatcattctcgaagacctgccgcattaccggatcatcagccagcggctgaatggcggcgggaacagctcctgtactgaatgacgccatttcttctggttcaggctcaagcagaacgcgaccgcgcataaagaggtgcatcagttccgcgccgggacgaaacaacacaatccccatacgatgggcgatctcgggggtaagcagagctctcacgcgacctgccccctggcaatgtgttctgcccacagtccaccaatccagcgcacgcctttcgccgtgaaacgtgcctggctgaatgcatgatttgaggttacggatgtgccggttttcacttcaaaacggcccgcatcaatatgctgatgccgtggggtcatcgttccgccaagacgatacatgatgtcgttctcaaggaggaataaccgcagatcgggctctttggccttaagcagttttgccacctggcggaatgacattgacccactggctgtacagtaccgatcaacaaacgctaccttcggcgccgcggcagccagttcgttagtcaactgctgtttttgttctgcaaggtcagctgcaagacgtagggcttcagagaatgattgaggaatcgtctgctgctgtgcctgctcaagctcctgccagcgatcaaccagacgcgcggtaaactccggcgacagctgcgcgacaacgatataactgtcccgcttccctatcagataaaccgataccgactgattgaggtgatttttaacttcccccattggggggagttcaataacaccgcgctctgccaggcgttcaatggaccgtttaacatggtcatgtcttgattccaccagctcagcaatatcgctgctggacatggttaacgctgttgttgctaactggctcatacttttctccatatcaggcggctgcacccgccggttcatatctgctgattgttatctctacccgacctttcggcacaacgggtccccattccaccagcatgcgcttaatctggctgtcgtcttcccagacacccgcatgcgtcagcgcgtcaaacagggctttgttgtaattatcgatatcccggcggcgcgcatccggcgggtacagagtgatttctaccgctgccagttcagtcgatggcttcgggagacgtcgtaattgctcaatgatcgccacgcaggcagcgctctggtatttacggccagcggcgctaatgaggtgacgaccggccagcggccccttgttaggggcgcgccagtaagtgttcacgctcggaggaaaaggcaggatcagtttcacgcggcctctccccgcatattgcgaacaagttcagaagcagcagtaatgatttcgctggtggcagtccgctccagccagagttgattgatattggctttcagcttgtgttgcagtgactcatccagcatgtcagcaccatccacctggtcgaatacaattctaacctccagcggccagatacgggactcgggaagcggatccgatactggtttagctttctcacgaatgtgcatgcggatctggcgaatattggaccaactggaaacatccaggcttcccatggctgcaatgaagtcagtgctgttcatgccatattcaccggatgcttcaagggcaacagtgcgaatacgttccgacatatccaggcgcacagcagcgtcatcgaattcaatcgacaacagccactcatccacaccgaacaaaatactctcacgaataagcagcttcgctttgtcgatcgttaaaggtgatacctgagtgaattccggtgcttcgacagaatccgccgcccaggtatgcccaaacttcgattcactgaatgtgtattcttctttatcgccaaacgcagctctaacgcatgcccacgcctcgacaccgctgatagcaaaaatatctttctgggtgagtggcaactctgcttctggcttatcagctgcaggaggtgtggcagttacaggttgagacttgctggcagcaaattgtgccaaagccataaacgcccgcccttttgcctccagttctgtgcggttgatatagctgaaccgctcgccacgccatgacttatcgaatacagctatggcaccggcaaaaaacgcgctggtgggtttctgtttttcgtcagcaggtacaaaccacacaggcagatcgaacccaatgcgcccgcgaatgaatacaatgtgatcggcatcttccggccaccacgtttcactcggcgcggcttttatcaggaatacatagcgaccgcccttctcgcgctgggctgctgcgtagttcatgatgtgcgtcatgccggtgatcgcctgcttctcgtggtactgcgaacggctatacggtgggttgccatagccagcgccacccagttcagccagacgttcagaccagtcctgcgtcagcgcgttatcttcggcggtgtaccatgccgggcatttcgcgttgtcgtcgtcagcaaacaaatccagaactaatggaccaaatagcgcgttgatcccccaaaaaagcagatccggtgtccgccactgatcgccaacctctttcaattcgtgagctggtttgctacgcagtgccgccagcgcctggcaatatttattggtcatcatgaacggaaccccgaattttctggcagtgagtaatcaacactctggaagtttgcgcggctggctgagttagtctcccatttgccgttaacgcgttcaggccggccagcactggaccatttggtcgcgctttgcaggtaaccagggaagttttttggaatgaacagagttgccgggcggaggtattgcgcctgctcgctatcacgccaatcggcatttttgtaatccactaccaagcacaggtcatcaacagtgaattgttcccgaagacgggcgcgaatattctccagcgacgtgctgcatacctggtagcgtgagccagtagtctgattcaggtaagacaaaacctgtctggcctgatcagtaatcacaacctcagggtcgggttgcgccgcaaccggacaagagggttttgaagttacttgtggttcttgttttgattttactgacggatccccaccagattctgacgggtcaaaaccgccttttttgctggatttcgacgcctcaaattttgacgggtcggattttgatgcatcagattttgatgggtcagattttgatgcgtcagattctgacaggtgagaaaaagcagcctctcgcaacttaacgacgttaagctgatatacgttcgatgcgttacggttcccattacggcgctgcttacgggaaagccagccatccttctcaagctgagcaagggccgtccttaccgtactttctccagcaccgatttgacgtgcgatcgtgccaatagacggccagctaacaccctcatcactactgaagtcggccagacgcgccatgatggcaacgctggataacttcatgcctgacgaagcgcatgcatcccatacgtaaccggttaatttagtgctcatggtcgtcctttaattctgtaaatttacgctggaattgttcaagagggctgaagcactcatgatcgtacccttcgcgaaggtatataacgcgctgtgtatctggctcccagcggacaactctgacgggaactccgtagtgatctctgaaccgccggttaacttcagccattcctcgcgccccttctcgttcatctgaacaaatgcttctaccatcaagtctgctggctggtagttgcctccatcagccgcgttatttatgatttccacatagccgaactgggcatctttacccaccagcggcaaacatctgaattgcttagctggtctgaatcggtttacactgttcatgcgttagtttctccactgatacgacacgccaaggcgcccggagctgcacactcgcgggcgtcaccttttctgcctgttgaaacgaatacgtcaatcgcctgatctgaaacaccaaccccataaagcgccataaatcccaggaacccgtgaatctggtggcggagcttcttactgaataattctgaaagcattttgcgctctgatgaatcaattaccccatcagccgctgctgccatcttggcattagccagctcaccagatgctgctgccgctttcatctcaatgctgtacagctcaacgttatccaggctctcagcagttggaacatccaccagccatttcccttttcggttcgcctggtactcggccaagtaacaagaaccagacaggtcctccatccgttccagttctgccaaggtaaagaaccgactgccacacttctggtacaggtggttgtggaactggtcgatagtcatccctaaatcggaagccatacctaagcgaccatgcttgtgtgccttacacatcaggcggattgctgtatttatgctgtctaccatgttgatttccctctggtagttaataatcaacttaaagttgactattgttgttagcggaaggtatgccgtcatttttgttcggataaatatcaggtcgtaattgatggggagttactacccatccgccccattggcagagttgaataactctttcagaaggtactcggttctttgcaatccagttcgcaacagattgaactgattggaattcaaaccgccttgatacctctgaaatcgacccgatcgccttcacagctttagctgttacattcttgtgttgagatgacatgtgttctcctatgactaagcctgcatcaatactacttatagtagcaattattagcaacttaaaatagaaatgacaactatgccttgtgcgcttaatcttctacttatggtggaaaatgctaaatacaaagactttgccgaaaggctaaacaggtctctccaagagcaatctattggagttaaagaattgtcagagttcagtggtgtctcgtatgagatggcgcggcgctacactcttggtactgcaaagccgagagatgagaagatgattcgaattgcagaaagacttgccgtctcaccggcttatcttgattatggtgtgcctgttaatggtggcgacgcgccagccaaaggcacggtcagaatagagcaattggatgttcatgcttcagccggttccggatatataaaccaaccattccctacaatagtgagctcaatagagattccagaagagaggatcttcgagttgtttggtcgtagaagccttgatggcatcgtcatgataaatgttgatggcgatagcatgatgcccacgctttgcccaaaggacctgcttttcatagacagcaaggttgaacaattcagcggcgacggcgtttatgtgttcaattttgaagacagtacgttcgttaaacgtttgcagaaggtaaaagggcgccgactggcagttctttcagacaatgaacattacccgcccttcttcatagaggagcatgaaatgaatgaactatacatattcggcaagctaatcagatgcttacctctaaaaatgatagagtttggctaataattaattcatcaagaaaccggcgaaagccggttttttttacgcctccaattcctcacctcataacactacactactaaaaatttcattttctactttttgttgttgcaattatctacttaaagtagctatagtcattgcatcgaaagcgaacaggcaggacgcccacgaagtagccgccggtggcatatgaataaccggatgattcgctgacagaaaacttaggttgggggtagaggtttacatgaatcatttattcacatgctcattttgcggagcaaccgaactgggagcgataaagatcgtcgcaaaaggtggtaaggacgaacctgccatctgttcggaatgcgtagtcacatgtgtagaaaaaatgatcctgactaaaaaatcagaggctgaaaaaccaacctctgataacgaaataatatcagtcgataaaaaactatttaaagagcttcttcagcttgtcctcaaccttcctgatttcggaagtaagctggctgctgttgacattgatagtagctccacatcgacaagtgaaacttttgttcgacttgagccaagcgattttcttcttcgtcttagtgccgcacttagggcatgcgggtaacgtaatttcctggttatcaaaagcgcccataaacatccctcttggttgtgtgagaacaccaagataccaccgcgcctgatgtggttaaaagcaggctaaagcaataacaagtaactccctgttctggcggcccggtgttttcccgtgtatttccggtaaccgccagcctttttcagggcacaacagaaaagggcatcaccgggcgacgggctcataacccaatccacccgggcaaaaagaaagcggtctctgcaagccgccgaccaatgcaggtgcccttctctgttgtgtatggagaaactaactttttagcgtctgtgcagatgcgctgaggaaccgagaatgaataatccgtttttcaaaaatatgttggtgtatcgcattagtcgcgatttcaccatcaaccaggaagagctggaacagcagcttgaactatttcgcttcactccatgcggtagccaggatatggcaaaaaccggttgggtatcaccacttggtcagctgtcagatcgcttgcatcacactgtcaataatcaagtgttgttggttattcgccgggaagaaaaaatactgccatctcctgtcattactgaagaactgcgcaagcgtgtgtcgcgtctagaatccgatcaggggcgtcgcctcaaaaaaactgagaaagattcgctgcgtgatgaagtgttgcactccctgcttcctcgggcgttctccaaaaactcgactgttggtttgtggatcaacgtcaccgacggtctgatcatggttgatgcagccagcgctaaacgtgccgaagactcactggccctgcttcgtaaaactctcggttctctcccggtggtaccgctgactatggaaacgccgatcgaactaactatgaccgactgggttcgttccggtagtgcgcctgctggctttggcctgggtgatgaagccgaactgaaagctattcttgaagatggcggtattggacgctttaaaaaacagactctggtcagtgacgaaattcatgtgcatctggaagctggcaaagtagttacaaagctgtctatcgactggcaacagcgcattcagttcgttctttgcgatgacggcagcatcaaacgccttaagttctctaatgagattacagaacaaaacgacgatatcgaccgtgaggatgcggctcagcggttcgacgctgactttgttctgatgaccggcgagcttatctctctcattaacggattaacaacctctctcggcggcgaagccaagcgataaacaccaggcaacaattacccccataagcatgggttgggttgctgcacgctaaattcagcaattcattaatttaatggcgcggtgcagcgcgccaatatggagaaaaccatgagctacattcagacattatccggcaaacattttaattacctcgatatccaacaggacgatatcgtgatcgaggatattgctaccgcgttgtctcatatctgccgctttgcagggcatcttcctgagttttacagtgtcggccagcatagcgttttaaccagccacctcgttccgcaggagtttgcattagaagcactgcttcatgatgctgctgaagcctacctgcaggacatcccctccccacttaagcgcctgcttccggattaccaggcaatcgaagctcgtgtggacgcagccattcggcagaagttcggtctaccaactgagcaacacccaaccgtgaaatatgccgacctggtgatgctcgccagcgaacgccgcgattttgagattgacgaaggttccatttggccatgcctcgagggagttgtcccaacggatttattcattatcaacccagttcgtcctggccagtcatacggcatgttcatcaatcgctttaacgagttgatggagcagcgccaatgcgccgcatgaaggtaaaagaactcgtagcggaggcgtttgcctccgttgctgaattgccaccaaagcatgcgccgcttatgcgcgaagtcgccaccagactggacgctacgttcgcagcattaaaagagtctctggtgcaactggaacaggaacgtaaagataaaacgccatgaccgtatttgaatatctccaggctcatccgaataccaccagcggtgaaatcgccaaaggtatgaacaaaaagaccccagcggtcgccggagcattatctcagctctatggcaccggtcggatcgtgaagtctggtgttcgcaagggtattccaacataccgcattaacgatatgccgtttggttgcagtaacagcctaaccatgatgtttaaccagctcttgagcagagccagacaaggagcagcccaatgacagcactcaacaaacaggcgctgcgtgaagaattccagttcatgcaggacaactatagcgacccggcagaccacgatcggcaggtgatttacatcgaggcggaggcgctgctggatgagttggaagccaaagactcaacgatagcagcacaacaacatgagatccgtatgttgctgaatgcgcttgaggaaaaaccatgcccgaaatgcaacgacacaggaatgactgatagtggcggcacgcagccatggggcgagccgattgagattgaatgcgactgccgacagcaggatgccaacaccgcagaacttgtagccgctggcattggcgtgaagggggagtgagatggataaattaatcaaacctaccgccaaaggtaaatatgacggttcatgtgattatctttgctcggaagatgcgcgattcatcgttatgcgcggcgattatacggaagcggaaataattcaggcttctgtgtctcaagatgtaatcgactcggatggtgcggctgattttgcaagtagcgcccgctattatcagtgctggtacaaagttagcccaataggtggtcaggatggctattcaggctggcatcatcctcgtgattcgccgtgtcgcggtgcatatttcgcatcagttttgcaatgggattaaggaggactaacccatgacaactaacaaccacccggcgcacggtcctgtatcactcgatcgcctgcaccagatacgcgaacacctgctgcatgatacccaatactcaaacggcgggaacagagcctacattctcgctgatgtattgaaggtgattgatggggctattgcccgcgagctggtacgccgtgagcatgcagcgtggtcacaggctactttcggcgatgtcggtccagttggtccgctgaagcacctttccaaagaagcgctcgaggctgctgctgaaccaggcgaccttagcgaatgggctgacatgcaattcctgttatgggatgcgcaacgtcgtgccggtatcagtgatgagcagattacccaggcaatgataaaaaagctggctataaataaggttcgccaatggcctgagccgaaagacggggaacctcgattgcatatcaaagaacagtcagagcaggagaaaaaataagaatgtttagcctgattcggcgcggtcaaatctacacggacagtagcaactggcccgtaattatccatagctgtagtgatcactcggtccgaattaaacgcaatgatggcgagctgagaacgattagcatcaaacgctttaacgaagattttgaacgagtggagcatgatgagtatcgcaaaatatgtgccgaaatagagcaggaaacaaacctgaaaaacctacgtgcgatgcgtcgcggcaagattactgaatagccaaacaggagaatatttaacgtgaacaacttaatgatcgaccttgagtccatgggcaaaaaaccgaatgcccctattgtctccattggtgccgtattcttcgatccgcaaagcggtgaactgggtcaggagttttacaccgctgttaatcttgaaagcgctatggagcagggagcggtgccggatggtgacactattctgtggtggttaagacaaagctcagaagcacgatcagcaatctgtgttgatgatgcgatgccgatatcatctgccctatctgaactgagccatttcattaatcggcattctgataaccctaaatatttaaaagtttggggcaatggagctactttcgacaacgttatattgcgcggcgcatatgagcgtgccggccaggtttgcccgtggcaattttggaatgatcacgacgtcagaaccatcgtcacattaggcagatctgtaggtttcgatcctaagcgtgatatgccatttgatggggttgcacataacgcactggctgatgcccgccaccaggcgaaatatgtttcagcgatttggcagaaactaatcccaaccaccagcaacagctaaagttttccccgggtgcagccgggataatggagaaataactatgagcaatattttccagttagctcccaacgattgggtttgtgaaagcgttttgatcgcggttactgggctcaaacccggaaccatcctccgtgccagaaaagaatgctggatgattgggagggagtatatccacgtatcgcctgacggaaatcctaaaccttccagtgagtgcatgtataacagaaaggctgtagatgcctgggtcgcttcaatgaaaagcaagcaaccagggtgatttgatgccatgaaaaaggtaagctcgtatcgctcttgggcgtctggaggtaacaccaatggataaagtcacatatccaacaggcgtcgaaaaccacggtggcacattacgcatctggtttaattttaaaggtaagcgtgtcagggaaagtctcggtgtccctgacaccgctaagaacaggaagatagccggggaactgcggacatcagtatgttttgccatccgcacaggaacctttgattatgcaacccagtttcctgactcccctaacctcaaggcttttggtgtaagtaaaaaagacattacagtgaaagaacttgaagaaaaatggctggatctgaaacggatggaaatctgcgcgaacgcatttaatcgctatgaatctgtcgcaaggaatatggtgccgaggatcggaggtaatcgcctggtgtcagcagtaaccaaagaggaattgctgtatctgaggaaatatttgctaactggttatcagaatccgacgaaaaacaaagccccggcaaaagggcgaagcgttgttactgtgaactattacatgacgacaatggccggaatgtttcagtttgctgcggatcacggttacttagaggtgaacccattcgagggaattaagcctctgaaaaaagccagggcagaaccagatcctctgtctcgtgatgaatttattcgcctgatagatgcatgccggcatcagcagacgaaaaacctgtggtcattagcagtgtacacaggaatgcgtcacggggaactggtctccctggcctgggaagatatcgacctgaaggctggaacaattaccgtcagacgtaattatacgaaacttggtgagttcactctaccgaaaaccgaggcaagcacagatcgagtggtgcatcttatccagcccgcaatcagtatcctgaaaaatcaggctgaaatgacaaggctgggcaggcaatatcacattgaagtgcagttacgtgagtacggccgttcggtgaaccatgagtgtacattcgtctttaatccgcatgtggtcagacgcagtaagcaggtcggatttatctaccgggtcgattcagtaggcgactcatgggaagcggcacttaagcgtgcggggatcagacacagaaaggcgtaccagtcacgacacacctatgcgtgctggtcattatcagctggtgcaaaccctagttttattgccagtcagatggggcatgcgagcgcgcagatggtgttcaatgtttacggtgcatggatggctgacagcagcgcagagcagatcgcaatgctgaatcagaagctggcagattttgccccattgatgccccatagccacgagaacagtacgggaggattattaaaatcagtaagttaacccctaacgcccgtcatgttaactgtgtggagggtaacaccacgctttatgccctgccgaaacccgaggttgtcctgcgctggcgtgagcagaccacagatgacttccgcttctgttttaagtttccggcgaccatttcgcatcaggcagcattacggcattgcgatgatttagtgactgaatttttgacccgcatgtcaccgttggctccgcgcattggacaatactggctgcaactgcctgccacattcggcccacgggagctgcctgcgctttggcattttctcgattctcttcccggtgaatttaattatggggtggaagtccgccatccacagtttttcgccaaaggggaagaggaacaaacgcttaatcgcggtttacatcagcgcggcgttaatcgggtgattttagacagccgcccggttcatgcagcacgtccatacagtgaagctattcgcgacgctcaacgaaaaaaacctaaagttccggtacatgctgtactgacggcgaaaaatccactgatccgttttatcggtagtgatgatatgacgcaaaaccgggaattatttcaggtctggttacaaaaattagcgcagtggcatcagaccactacgccttatctttttttacatacgccagatattgcccaggccccggaactggtacataccctgtgggaagacttacgtaaaacgcttccagagatcggagcagttccggctattccacagcaatcttctcttttctgaatttgccacctatcatagacaggtgccatcggccattttaaagggagtttgtatggtaagcgcgctgtatgccgttttaagtgcgttgttattaatgaagttctcttttgatgtcgttcgcctgcgaatgcagtaccgcgttgcctatggcgacggcggttttagcgaactgcaaagcgctattcgcattcatggtaacgcggtggaatatattcctatcgcgattgtgttgatgctgtttatggaaatgaatggcgcagaaacctggatggtgcatatttgcggcatcgttttgcttgctggtcgtctgatgcattattacggttttcatcaccgtctgttccgctggcgacgttctggcatgagcgccacctggtgtgcgctgttgctgatggtgctggcgaatctttggtatatgccctgggagttggttttctccctgcgttagcgcacaatacgccactttctttttcccggatttttacgttatgtctcaccgcgacacgctattttctgcccctatcgccagactgggcgactggacctttgatgaacgggtagctgaagtcttcccggatatgatccagcgttccgttcccggctattccaatattatttccatgattggtatgttagccgagcgcttcgttcaacctggtacgcaggtttacgatctgggttgttctctgggcgcggcgacgctctcggtgcgtcgcaacattcatcatgataattgcaaaattattgccatcgacaactccccggcgatgattgaacgctgccgtcgtcatattgacgcctataaagcccctacgccagtagacgttattgaaggtgatattcgcgatatcgccattgaaaacgcatcgatggtggtgctgaattttaccctgcaattcctggaaccttccgagcgccaggcgttactggataaaatttatcaagggctgaacccgggcggtgcgctggtgctttcggaaaaattcagtttcgaagatgccaaagttggtgaactgctgttcaacatgcaccacgactttaaacgtgccaacggttacagcgaactggagatcagccagaaacgcagcatgctggaaaacgtgatgctgaccgattccgtggaaacccataaagcacgcctgcataaagccggttttgagcatagcgagctgtggttccagtgctttaactttggttcactggtggcattaaaagcagaggacgctgcatgatcgactttggtaacttttattctctgattgccaaaaatcatctttcacactggctcgaaacgctgcccgcgcagattgctaactggcagcgcgagcagcagcacgggctgtttaagcagtggtccaacgcggtggaatttctgcctgaaattaaaccgtatcgtctggatttattgcatagcgtaaccgccgaaagcgaagagccactgagcgccgggcaaattaagcgcattgaaacgctgatgcgcaacctgatgccgtggcgcaaagggccgttctcactgtatggcgtcaacatcgataccgaatggcgttccgactggaaatgggatcgcgttatgccccatctttctgatttaaccgggcgcaccattcttgatgtcggctgtggcagcggttatcacatgtggcgcatgattggcgcaggggcgcatctggcggtgggtatcgatcccacgcagctattcctctgccagtttgaagcagtgcgtaaactgctgggtaacgatcagcgcgcacatttgttaccgttaggtattgaacaacttccggcactgaaagcctttgataccgtcttttcgatgggcgtgctttatcatcgtcgttcaccgctggagcatctctggcagttaaaagaccaactggtgaatgaaggcgaactggtgctggaaacgctggttattgatggcgacgaaaacacggtgctggtgccgggcgatcgttacgctcaaatgcgtaatgtctatttcattccttccgcgctggcgctgaaaaactggctgaagaagtgtggttttgttgatattcgcattgcagatgtgagcgttaccaccacagaagagcagcgacgcaccgaatggatggtcaccgagtctctggccgattttctcgacccgcatgatccgggtaaaacggtggaaggttatcctgcgcctaaacgcgcggtgctgattgcgcgcaagccgtaaaggtctggtaatactgccggatgcggcgtgaacgccttatccggcctacaaagtcttgctaattcaatatattgcaggggctatgtaggcctgataagcatagcgcatcaggcagttttgcgtttgcataacctcagcgcccgtttccgggcgcttttcacgtcttatgcctgaacagctggctgatcaaacgccgttaacttcagcgcattgcccgtatatttttcgatatacaccagcgcagagttaccggcacaggcattcgccagctgcgagctggggatatccgccgttaacacgttcgcactaccgtttttacacaagccattttccagatctggccatgcaccttcatgcacgcataccacgccttttttgatcccgtcagtcaccaccgcgcctgtcagaatctgaccgcgcttgttccagacacgcaccagatcgccattcgcaataccaaagcgagcagcatcttcggtgtgaatagtgattggttcacgatcggcaaccgcatattttttacgcagttccgcatagttaagctgactgtgtaaacggtgtgccggatgtgcggtcagaagctgcaactgcttctcgtcggcggtacccttccactcatcaggcgcaagccaggttgggtgtgccgggcaatccttatagccaaatttttccagcgttctggagtaaatctcaattttgccgcttggtgtacccagcgcatttttcaccggatcggcgcggaaatcaccataacgaatgtactgttcgttcttctcgctgcggcgcatttcgatcagtttattttgctgccagaaggcattaaacattggcatcgtcacgcgttgcgcacgcgcacctttctgagcggcatcatagaaaaatttcagccacgccatttcatctttaccttcggtatagatctcttttccgccaggtttgagtaattcagcaagatcggcaaacacgtcaaaatcgttgcgcgcttcaaattgcggagcgacagcctgcttcatcagcacaatatgctggttgctgtaatcaccggtcatcgtcaggtcattgcgctcaaacgatgtggtgatcggtaatacgatatctgcgtgtttggctgctgcggtccagtagcattcagaaacgacgatcatctccggtttctgccatgctttaatcagacgattagtatcctggtgatgggtaaagttaccgccacccgcccaccagatcattttgatattcggatacgtttgttctttaccgttatgctgatatttgccgccaggattttccagcgcatcgacgatacgggcaacaggaatcgccgtcattccgccatcatcagcggcctcgctggcctgtccggcaatcgccgcagacatttctggtagcacgccgccaacacgcgtcgggttgccaccgttggagtaatgataagagaaaccaaacccgccgcccggtgtaccaatctgccctaacatcgccgccagcgtcaccagcatccagtgtttctgttcaccatattgctggcgctgaattccccagcctgccatcagcattgtgcgatttgccgccatcagttcagcgagtttgactatctgcgcttccggtacgccagtaatttccgccgcccaggccgcgctcttcggcgtattatcgctcttacctgtcagatactcttcaaactgcggatacccggtagtgtatttttcaaggaacactttatcgtgtttgccttgtgtcatcagggtatgcgcaatccctaacatcagtgccacatcggtgcccatattcggtgcgatccaggtggcattatcgccaaagaattcgatggtttcggagcggataggatcaatggcaatcactggtttgccagattttttcagctgatggaagtattccagcccttgctcatcggtactgctccaggcaattttgagcgtgttcagcgggttcatcccccacagcaccaccacctggctgttttccagaatcagcggccaggaggtctgctgttcatacacctctacagaaccgaccacatgcggcatgatcacctgtgccgctccggttgaataatcgccgctatgcccggaataaccgcccgccaggttcatataacgttgcagtaaggtttgcgctttatgcaacacaccagaagaacgccagccataagatccggcaaaaatggccgatggtccgttagctttgcgaatgcgatcgtgttgttcatgaatcagttttaatgcttgttcccagctcacctgtacataggtatcttcgccacgacctttcaccggttgcagtggattatcgagatagctttttctcaccatcggatgctgaatacgcgccgtggtgtgtacctgatccgccgccgtagactgtaaggagttcggtatggttttcgccagcgcgcctgtcgaagaaacaatcttgccgtccttcacttctacgttcatcgctccccaacggcccgcagtgagaattttgccgcccttctcttctgcccatgcgggtagcggtgcagccgatgtcaccaccagcgtccctgccgcaataccgctatgtttaataaattcacgtcttgttaatgtcataacttcctccctgatcaacgaggatcactgtttctcggtaatatctttggcgttgtactggaagtaccgcgtcaaaatgtccagttcgttttcgctcatgctggttcgcgcacccattcctttggcaatggacggccatgtattgacggtgtaatggtcggcggcaataggggcatggcagccagcgcaataggtatcgtcaagtttttcagcgtattgccatagcggtttacggtccgctaatgcgggatcgataagcgccccctgcaaagacgcctgacgccattgattgccgtattcgtcagcctgccattccccgtttaccgttagcgccttgataccttcttcacttaatgtggcgagcgccagccgttggcctgccgccaggtagagcgtgttttcactgccctgcatttgataaccctgcaaccgaacaattggctgtttgccactggcatcaacgacggtaagatcggtaccaggagtcacggtagccagttcgcctatgcgagaagttttgaaaggataaatatgtgcgccattagtaactgaagtagcggcctgactttccagctcatgcgccgcgttgtcatccatttttatttctggcggaaaatgggcaatgcctttatggcaatcgatacaggtttcgccgtccttttgcgctttattatgcattttctgcgcagattcactttgcgaggcaatatccatggcatcaaaagaatggcaactacggcaggttgcagagtcagttgcttttaattctttccatactgtttcggccatttcctggcgatgagcttcgaacttatcatcactgtctattttgccgctaacaaattcatgataaatatctttagatgcttttaatttagcaaataaataatccatccctgactttggaatatggcaatcggcacattccgcacgtatccctttctggtttgaaaagtggacagttccctgatattcctcaaaaggtttactcatcgagtggcaggaaaggcaaaatgcggtatccgacgttttatgtaaggctttttgcgccagcaataacccgccgccaccaaccacaaccgctatcagcaaaaacaataacccaatgcgttttttccctcgcatagattcctctaattaaattccaggacaccgataccattgtataaataaatacacaacgaattgactacttgcttaattcggcacaacactgcctgaaataatcgataaagaatatgatttattacaatgtaatcattaattgctaaggaataacccagttgttatttagaatatatatttgtcagttttggcaatttaaatcacataatgaatgtgaatatataaaatatttttagcacaacgctatgcgcactgtcacccgctcaacagatcacggcaatcgttcgttttttatactgctcagggataaaaaaaggcccctgttgaaattgcaggggcctggtacgagcaagcatcatattgggcgacatgatgcaacggtaaaaatcatttggcctgatggcgttcaatgattcctttcatttcagcaaccgccgccccgtctacgacataacgcgaatactcgtccgcgtgtgcatctgatgacatggacaatccttgattacgataacgcatcggtgaggcttgccacgctcccgcggagctatggacttccagcactccggcatcgaggaagtggtgcaggttttccgcacggactcctgctccggccataatgattggagcatcacgatgggcaataagttccataatttttgataaaccttgcagtgcgtctgatttttgccctgatgtcagtacccgggcaatgcccaattccgtaagattattgagtgtatttaaagggttagcgcacatatcgaaggcgcgatgaaaagtcactgccagcggaccggcagcagccattattttttccattcgtggcatatcgacattcccgtcaacatcgagaacgcccgtcaccagtccaggaaaacctaattcgcggactgtgcgcacatcttcaagaatggcggcaaactcaccgtcgctgtagcaaaaatcaccaccgcgtgggcggataatcggatgcactgggatcgtcacccgctggcgcacggatttcagtacccccaacgacggcgttaagcccccctcttttggagctgcgcataattcaactctgtcagcgccgttttgctgcgccgttagcgcgcattccatgctgtaacagcaaatttccagtaatgccatttttgctccttagttacgccgactgctcgctggcaacgatctcttcaatggaccacggatgaaacttaatggttgttttaccatcggtgaccgccagcgtcggattcggtaatcgttcatgctcaccttttggcgaactggttttaactgagatccccggcaggctgagtccttcatcagaaagcaatgccagcgcacgggcattcagcgtttctggatcacccggcagaacgatttcaatatgttcccaaccttcgtgcgggtaacgtttttccccgggccacggtagctccacaatggaaaactgccagtgcgcaacctgtaccggttcatgcaatttaaacagacaaatcggtctgccattgatcatattttctgacaaaagctcgccgcactgttcaaacccgcgacgccagcgttcagcggtgacgttttgatggcaacgcaaggaaatgtgatcggcagtcagcggagtgatatccaaccccagacggcgggaaagttcatctaatgcgtgggtaaatcgcggtaaatccgatgcaatatcctgcagctcgtcgatagattgccagttcgccataatcactcttcgtctttcattaaaagcgttaatttaccctgttgccctgcgccaaccaaccgctgatttcacgccgcttctgatgcaatagtgaaaacggcaatacgccacgcgcacgttgctgacgaaaacagccatttgcagtatactcccgccctaatttctttaactggtgcgggcaatttttgctcgcttcatcaatgtaaggtattccggtgaatattcaggctcttctctcagaaaaagtccgtcaggccatgattgcggcaggcgcgcctgcggattgcgaaccgcaggttcgtcagtcagcaaaagttcagttcggcgactatcaggctaacggcatgatggcagttgctaaaaaactgggtatggcaccgcgacaattagcagagcaggtgctgactcatctggatcttaacggtatcgccagcaaagttgagatcgccggtccaggctttatcaacattttccttgatccggcattcctggctgaacatgttcagcaggcgctggcgtccgatcgtctcggtgttgctacgccagaaaaacaaaccattgtggttgactactctgcgccaaacgtggcgaaagagatgcatgtcggtcacctgcgctctaccattattggtgacgcagcagtgcgtactctggagttcctcggtcacaaagtgattcgcgcaaaccacgtcggcgactggggcactcagttcggtatgctgattgcatggctggaaaagcagcagcaggaaaacgccggtgaaatggagctggctgaccttgaaggtttctaccgcgatgcgaaaaagcattacgacgaggatgaagagtttgccgagcgtgcacgtaactacgtggtaaaactgcaaagcggtgacgaatatttccgcgagatgtggcgcaaactggtcgacatcaccatgacgcagaaccagatcacctacgatcgtctgaacgtgacgttgacccgcgatgacgtcatgggtgaaagtctctacaacccaatgctgccgggtatcgtggcggacctgaaagccaaaggtctggcagtagaaagtgaaggcgcgaccgttgtattccttgatgagttcaaaaacaaggaaggcgaaccgatgggcgttatcattcagaagaaagatggcggctatctctacaccaccactgatatcgcctgtgcgaaatatcgttatgaaacactgcatgccgatcgcgtgctgtattacatcgattcccgtcagcatcaacacctgatgcaggcatgggcgatcgtccgtaaagcgggctatgtaccggaatccgtaccgctggaacaccacatgttcggcatgatgctgggcaaagatggtaaaccgttcaaaacccgcgctggcggtacggtgaaactggccgatctgctggatgaagccctggagcgtgcacgtcgtctggtggcagaaaagaacccggatatgccagccgacgagctggaaaaactggctaacgcggttggtattggtgcggtgaaatatgcggatctctccaaaaaccgcaccacagactacatcttcgactgggacaacatgctggcgtttgagggtaataccgcgccatacatgcagtatgcttacacgcgtgtattgtccgtgttccgtaaagcagaaattaacgaagagcaactggctgcagctccggtaatcatccgtgaagatcgtgaagcgcaactggcagctcgcctgctgcagtttgaagaaaccctcactgtggttgcccgtgaaggcacgccgcatgtgatgtgtgcttacctgtacgatctagccggtctgttctctggcttctacgagcactgcccgatcctcagcgcagaaaacgaagaagtgcgtaacagccgtctgaaactggcacaactgacggcgaagacgctgaagctgggtctggatacgctgggtattgagacagtagagcgtatgtaatcgcgttatacggcaacagccgatgttattgcagacatcggcttttttatcattaacgataatttacaatcacttcattccgttgaatctttagcggcggaattaaccgcccaccgccaggcacttcccagataaatcgcaacggttctgctgccgctataccggaaaaggccacggtggttccactctgcccttctaattcgacacaacgagattgtgaacacaagcgaacccgcagtcctgcaggtgtcgggccgataagctgataacgccacgccaccagcgtcatcaatcctgcagcaggttgtcgagtagaaagaggcgctgacgacatcgactcaccacggtgattcagcgtaacgcccacgctactcgcctgccacatcccctccccggcggcttgcaccagcagcggaaacaataatattgctaataaggctctcattatttgccgccaatcgtcgccgtcatacggatatgtcggttatctgatagttccagattcgacagcaccactaactgcggcaagctgcggcgcaggaagcgagacaataatggtcgcagcgcgtggttcaccaacagtaccggcggcgcacccaacatctcctgacgggatagcgcttcctgagtttgcgccaacaagcgatccgccagccctggctccagtccccccccgccctgcaatgcctgtagcaacaaacgttccagcggtgtatcgaggccaataacatggacttcatctttgccaggaaaccactgctgggtaatcgcccgtcccaacgctacgcgcacgacggcggttaattcatgcggatcgctctggatgggcgcatgttccgccagcgtttcgagaatggtgcgcatatcgcgaatcggcactttttcatcgagcagattttgcagcactttatgcagtgtggtaagcgtgacgacgccaggaacgagatcttccgtcagctttggcatctcctgggcgacgcgatccagcagctgttgcgcctcctgacgaccaaacagctctgcggcatgctggctaatgaggtggttaagatgcgttgccaccaccgtgctggcctcaaccacggtgtacccctgaatctgcgcctgctctttaagcgcactttcaatccagatagcattcaggccaaatgccggatcgacggtcgcctcaccaggtaacgtcccggcagcggttccagggttaatcgccaaccaacgccccggataagcatcaccactgcctatctccacgcctttcatcaaaatgcgatagcgggcaggttgcagatccatattgtcgcgaatgtgcaccactggcggcagaaaccccatctcctgagcaaatttcttgcgaatactgcgtatacggcccaacaactcaccatcctgctggaaatcgaccatcgggatcagtcgataacccacttccattcccagagaatcttccagttgtacatcgttccacgtcgcttcgacaacggtattattctctgccatttttaccggttttggttcagcaggcgctttttgttcacgtccgcggatccaccaggccagccccagcaatccggcagtgaacagcaaaaataccaggttcggcattccaggcaccaggccgagtaaaccgagcacggcggcgcttaacaacataacgctcgggttactgaaaagctgattcaccatctgctcgccaacatcctgatcggtgctgacacgcgtaacgatgacccccgcggcggtagaaatcaccagcgccgggatttgtgccaccagaccgtcgccaatggtcaatagcgtataactttccgccgcgtgtcccatgctcatgccatgttgcagcacaccgaccagcaacccgccgacaacgtttatgaccatgataaggatcccggcgatggcatcgccgcgaacaaacttacttgccccgtccattgagccgtaaaaatcggcttcctgagtcacttcggagcggcgttttttcgcctcatcttcaccaatcaatccggcgttaaggtcggcgtcaatcgccatctgcttacccggcataccatcgagaacaaagcgcgcacccacttctgcgatacgcccggcacctttggtgataaccataaagttgatgatcacgagaatgacaaacaccacgataccgatagcgaaattgccaccaacgaggaagtgaccgaacgcttcgaccacctttccagccgccgccgcgccggtatgcccttccatcaaaatgatacgggttgaagccacgttaagtgcgagacgcaacagcgtggtaaacaacaggatggtcggaaacgcagcaaactcaagcgtgcgctgggtaaacatcgccaccagcaacaccatgatcgacaaggcaatattgaaggtaaacaacaggtcgagtatgaatgcgggcagtggcagcaccatcatcgacaagatcaacaggatcaaaatcggtccggcaaggatctgccattgtgtcgatttcaggtttgcgggcaggcgcagcatcgcggccagattactcatgggtcggtttctcgttaataaaatccagggcttccggcaccggaagatgagtaggttgtacagggcgctgtccaccagccagacgccagcgtttcagttgccagacccaggccagcacttccgccactgcggcgtacagttgacccgggatttgttgaccgatctccgcatgtcgatacagcgctcgcgccagcggcggcgcttcaagcgtcgggacgttattttcagcgccaatttcacgaatgcgcagcgcgaccagccctgcacctttagcgaccactttcggtgcgctcattttgttttcgtcatactgcaacgctaccgaatagtgggtcgggttattgacaatgacatccgctttcggcacatcggccatcatccgacgccgtgcggccgctcgctgcatctgacggatccgccctttaacatgggggtcgccttcgctttgtttgaactcatcacgaatatcctgccgtgacattcgcagctttttcaggtggctgaagatttggaaaaagacgtcaaatcccaccattggaatgacaccaagcaccaccagcagcgcgcatagccctaccagatccatcgcattacccatggcggtaatcggagactcggccattaagcgcatcatctgcggccagtgatgccagagaaaaaaccccgtcacgctgccaaccaggatggttttcaaaattgccttaagcaactccgcgccagtctgtgccgagaacatccgtttaatgcccggtagcgggttgagtttggaaaacttcggctgcaaggattttccgctaaataccagcccccccagcataaccggagaaataatcgccaccagcaccacgccgctaatcagcggtagcagcgccagcatggcttctctgatcagcagaataatctgcccgaggatcagattcgggtcattgataatactgtgatcaaaatgcagccctgcggagagcatgcccgacaatcgacgggccagcgacacaccgccaaaccagataacactaacgcccaccagcaaaatcagcagtgaagtcagttcacgggaacgcgggatttgcccctcttcccgcgctttttctagtcggtgaggtgtgggggcttctgttttgtcgtcgctctcgtcagacacgtcgccaatcctggaaagagtattaagcgtaaatgatgccagagcgcaaagcgttcaatggtttgagtaaggggcaaaacaggcgggatttagggcttttgccacagcacatcaggcatggtgacatgtttgtcgggtacggcgtaaacgccttatccaaccttgaagatctgatgtgacgcggccacgtcacatcaggcaatacaaatcaaaatccaagactatccaacaaatcgtccacctgatcctgactggctaccacaccggctttgctggtatcgacctgaggtccattaagcaaactctggttttcacgttttggacgcgactcctgttccgggatgttttccaacagcaccatcagcaactgacgttcgatctcctgaatgacgtccatcatccgcttaatgacctgtccggtgagatcctgaaaatcctgcgccatcatgatttccagcagttgcgcgttagtaaagctggtatgtgcggggacatctgccagaaattgccgcgtgtctgttaccagttcacgggcgtcggcaaggtcaatcggatcggcaaaccagtcatcccaacgttgggttaacgcttttgctgatttctccatttgatcctgatgcggttgtgacgcctcaacactgttcagcgcccgctccgcagcctgggcggtcatctgcacaacatagtacaaacgatcgcgcgcatcggggatagcttccgctgcttcggcaatggcctgatccagccccagttcccgcaaactgtcgcgcagcatacgcgtcaggctgccgatgcgcgcaatgatatcgccagctgaatgctcgtcagcaggtttgattgatggttgcatcatagtcgcatcctcacatgcccagtttctcaaagattttgttgagtttttcctccagcgtcgcggcggtaaatggtttcaccacatagccactggcccccgcttgcgccgcagcaatgatgttctctttcttcgcttctgcagtcaccattaacactggcaatgccgacatcgcgccatccgcacgaatcgttttcagcaactccaggccatccatattgggcatgttccagtcggagataacaaatccataaccgcctgcctgcaacttattgagagcgtcgaggccatcttccgcttcctcaacattattgaatcccagctctttcagcaggttacgcactatgcgtcgcatggtggaaaagtcatccacaaccaaaaatttaagttctttatccgccatttcacactcctgatttaaatacgtatcgcctgtccggcactaatttttgccagcatttgctgacttacctggctaagatcgaccacttcgcagacaccacccatattgatggcctcgcgcggcatgccgaacaccacgcaacttgcttcgttttgcgcaagggtccatgcccccgcctgacgcatcgccaacattcccgccgcgccgtcgttgcccatgcccgtcaggatcaccccaaccgcattacgccccgcctgtttggcgacagaatggaacaacacatctaccgatggccgatggcgattaaccgccgggccatcgtgaattttgatttgataattcgcgccgctacgcgccagctccatatgccgatcgcccggcgcgatataggcatgtcccggcaagacgcgctctccgtcttcggcttctttaaccccgatctggcaaagcttattaagtctgtcggcaaaagagcgggtgaaaccgggcggcatatgctgggtaattaacagtgccggactggaaagcggcaacggttgcagtacgtgacgaattgcctcagttccacccgttgaagcaccaatcgcaatcagtttttcagaactcaacaacggccccgccttcagcgttgtcggtgccgacaatggcttatgtgctgcaaggctcgcctttgctgccgtacgcaccttttcagcaatcatttcgctatacgccagcattccttcgcgaatacccagttgcggtttggtgacaaaatctatcgcccccaactccagcgcgcgcagcgtgacttctgaccctttgccggtcagggaagaaaccatcacaacgggcattggacgcaaacgcattaatttttcgaggaaatccagtccgtccatccgcggcatttcaacatccagcgtcaatacatcgggattgaatttcttaatcaaatcacgcgcaaccagcggatcaggggcggtcgccaccatttccatgtcgctatggctgttgatgatttctgtcatgatctggcgcatcagtgccgaatcatcgacagataacaccctgattttgctcatcgttaatccttacttagcgcatacaccgtctgaccacgcagcgtgaagcggcgctcaaggtggctaaagttttcagagtgacccgcaaacagcaatccgtcgggtttaaggagcggaacaaagcggcgcaaaatctcctgctgggtagtttgatcgaagtagatcatgacgttacgacagaagatcgcatcaaacggccccggcacggtgtactgtttcgccagtaaattcagcggggcaaaatcaacatagttcgccagctcctgacgcacgcgtaccagcccttcatgcggtcccgtccctcgcatgaaataccgttgcagttgctgcggcgtcaggtttttcaactcttcatggcgataaataccgcttctggctttttccagcacttcggtgtcgatatcgctggcaaacactttccagcgtccgggcgcggtgcccaatgtatcagccagcgtcatcgctatgctgtacggctcttcgccggttgaagccgccgcgctccatacgcgatactcgccagaacggcgacgtgcgtgatccgcgagcagaggaaaatggtgtgcctcacggaaaaatgccgtcagattcgtggtcagcgaattgataaacgcctgccactcaccgctgtgctgattagattccagcaagttcaggtaatgaccgaaatccgccagtcccagcgcacgcaaacgacgaaccagtcggttgtaaaccatgtcgcgtttatggtcagccagaacgatcccggcgcgttgatagatcaattgacttatccgccgaaaatgcgcgtcggaaagcgccaggcgctcggtcatctgtaacaataaagacgtttgcccacagggcagagatgaagtcatagcgccttctcaatcacttcaggataccactggcgcaatttgtaactgcgccgactcatgtcgtgctacttcatgttcttcaagggtaaataccgccacacgcgacgaaagatggtcggcctgattcagtcgttgcaaatcgtcgcgaaatgcccaaaagacatgccgttactgccaatctgcaagatcccgcagagaatcaaaattaaaaacagcgtggtcgaaattcgaatacgattaaacatcaacgctccccatcaggcggcaatgaccgctttagtaaatactcgtcaaaatgtttcccagtttggatcttgttcagcaattcgcagtcgtggctgtgccggtggttgctcactggcaggacgggatggtgtttgcggtttattggtgagtgggctggctgccagacggaacgcggaaaccgcttgcgttaaacgactcgcctgttcttccagcgcagctgcggcggcagctgattcctgcaccagcgatgcgttctgttgcgtgacgcgatccatttccgaaaccgccaatgcgacttgatcgatgccacggctctgttcatccgatgctgatgcaatctcgcccataatgtcagtcacgcgagtgacagcattgacgatattgttcattgtttccccagcgctttcgaccagcaccgaaccggtatcaacgcgcgagacggagtcttcaatgagggctttgatctcttttgccgcctgtgcactgcgactggcaagattacgcacttcacccgccaccacggcaaaaccacggccctgttcacccgctcgcgcggcttcaacagcggcattcagcgcgaggatattagtctggaaggcaataccatcaataacgctgataatgtcggcaattttcttcgaactatcggcgatctcatgcatcgttttcactacgccatccaccactttgccgccgtgctgggcggtgtcggaggcactttgcgccagttgcgaggcctggcgggcgttatcggcgttttgcttcactgtcgcggtgagctgctccatgctggcggcagtttcttccagcgcggatgcctgctgttcagtacgggaggaaagatcggtgttgcccgccgcaatttcacgggtaccggcatagatggcatctgaaccttcgcgcacatgagtgacggtgtcagtcaaagagcgttgcatatgtgaaacgctctgcgccaggtcgcccatttcactgcgcccgtcaatggtcagggtattcgccaggttaccaccggcaatttcgcgaatatgcgcaataatttttgccagcggtgtaagcaacatacggcgaataccgtaccacgccaccagcagaatcaataccaccaccagcgcgataaccgccagttgccactgggcaaatcggtaatcatctacgttgtcagtgacgatatcgcgatacagtttttcactgctgagggcgtactgagcaaacgcttcgcccattgcattttgcattccctgggttggctgagcgaaataagctccagtattgccataatcaagataatcaatcagttcagttaacgctgtgtgatagtttttatatttttcatcaatattacgactggtagcgaccatttcaggtaacggtgccatgcttttgaattttttataatgagtcgcggcctgggccaatgttttcctggcgctatcgagcaattcaactttggcattactttgctgattggatgaatccatcatcatccgcaccgctgaacgactcaggttaatgcgcgtttgcagcattaaatcccatgttgacgtcagctcgccctgctgttcccgtaattgattggaaaccacaaagctcttctggctatggtgaagggaagaaaaaaacagactgccggaaataagctgtaacagtgcgaatacccccagcaccattaccaacagcgtgactacgcggatacggttaatcataaggcaccttcctgaaaacatgttgatctcgttatcggcaaggaggggggaaactttattgctgatgccacccgccgcgcaattgaaataaaaaacccgatgcgcagatcatcgggttcatttcaattgaggaaatcgggagaattacgccacttctgacgccgcgctatctaacagcgccatctcttcgctgttcagcagtttttcgatgttcaccagaatcaacatgcggtcgcccagtgcgcccagtcctgtgagatattcggttgaaagcgtcacggcaaattccggtgccggacgaatttgctccgccgtcaatgaaagcacgtctgagacgccgtcaaccacgatgccgaccacccgctgtccgagattcaggacgataactaccgtgttgtcgttatagtccacatccacctggctgaacttaattcgtaagtcaacaatcggcacaataacgccgcgcagattcgtgacgcctttgataaacgctggcgtgttcgcaatccgtgtcacctgatcgtagccacggatctcctgcactttcagaatatcaataccgtactcttcatcaccaagggtaaataccagaaattcctggcctgacggctcgctggccagctttgttacattcgtcataccggtcatattgttacctttttactcattcaggcggcggtgttcgccatacgttgttcgcggtttatcgcctgcaaggcggagacatcaacaatcagtgccacgctgccgtcgccaagaatggtcgcagcagaaatgccggggactttgcgatagttactttcaaggtttttaaccacaacctggtgttgaccaattaattgatccaccagcaaggcgtagcggcgaccgccactttgcaagatcaccacaattccctgggtggcttcggttttcgcgcccgcgacgttgaacactttccacagttcgacgatgggcagatattcaccccgcacttccagcacccgctcgccgccagccagtggatgcagatcggcttcacggggttgcagtgattccatgacagcattcagcggcagaatgaaaacttcatccgcaacgcgtacggacatgccgtcaagaattgccagcgtcagcggcagtaaaatgcggatcgtcgtgccagtaccctgcttcgactggatctcgacatgaccgcccatctcctggatattacgtttaacgacgtccatgccgacgccacgcccggagacgtcggtgacctgctccgccgtggagaagccaggtgcaaatatcagcattgcaacttcgtcgtcgctcatgttttcgctgacggtcagaccttgcgaggccgcttttgccagaattcgttcacggtttagccccgccccatcgtcggtcacttcaatgcaaatgttgccgccctgatgttcggcagacagaattaaatttccgacgctgtttttacctgcagcgagccgtttttctggcagttcaataccgtgatcgaggctattgcgtaccaggtgggtcagcgggtcgataatgcgttctatcaggctcttgtcgagttcagtggaactgcccaccagcgtcagttctacctgcttgccgagttttcccgccagatcacgcaccagccggggatagcgactaaagacatattccatcggcatcatgcgaatcgacatcactgattcctgcaaatcacgagcgttacgttgtaactgccccatgctggtaatcaaatcaccatgattaaccgggtccagttcgctggaacgctgggcaagcatggactgggtgatgaccagctcaccgacgaggttaattaattgatcaaccttttctaccgctacacggatgctggtggattcactgctgcgcgtcgttttttcccgctccacgcgaccggttggcgcttgttcggctgccagtttaagcattggtggggtggatatttttggcgagacgtctactgtttcaaaggtaatctgatcggcttcaatcacaaaacagagtaccgcagtgatgtcatcttcggcgatgtcgtccggtaatattgccgagagggaatcagcccctttcaccacgtcagttaacgttgtcagatgccccaactcttcttccagcaggtcgacttcgccggccttcaggcgcgaaaggataattcgtcgcggtgactgactacgactctgctcatcttgcggttcacttttggcaaccacacttaatcgggtcactgcagatggcgtttcgcctttcgcttctaatgccagttgacgtaaggcctggcagatataattgaagctggcggcatccggctcttgcgactgtttataagcgtcgagctgttcttgcatgatgtccttcgtttccaaaaacagattgataatgtcggtgttgagttgcatctcacctcgtctggcttcatcgagcaggttttccatcagatgcgtggtttcctgcaaaacgctgaagccaaaggttcctgcccctcctttgatcgagtgggcagcccgaaagatggcattcaattgttcggcatctggcgcttccggctgcaaaaccagcaaatgctgctccatatcagccaacagttcgtccgcttcatcaaaaaatgtctgataaaaatcgcttatatccatgctcacgctgtcacctcggttcggctgatggcattgtgggaacactgacctgtggtgcaacctcaggtttttccagggcgcttactggctcattctggctttcggcgttttcattcaaaatggcctgttcggcgtgtttgttcagtaccagcaggctgatgcgacggttgacggcatcatcaggtccgcgatcgcttaagcgcatcgttgccgccatgccgacgacacgtaacactttgccgccattcaacccaccaaccatcagttcgcggcgggatgcattggcacgatcggcagaaagctcccagttgctgtaacctttctcaccgctggcgtagggaaaatcatcggtatgacccgagaggctaattcggttgggaataccgttcagtacgggcgcgatggcgcgcagaatgtcgcgcatatagggttcgacgtcggcactgccggttctaaacatcgggcgattctggctatcgatgatctgaatacgtagaccttcctggaccagatcgattttgagatgtggacgtaacgcccgcagtttcggatcggactcaatcaactggtcgagatcgccacgcaatttccgcaatcgactttgctccatgcgttttttcagctcttcgatgttcggctgcttattcacttccccctggctttgggtgtaatcatcacccccaccgggaattgggctttcactattagaaatgcgatcgccgcccgtaaccgcagtcgccagtggagtccggaagtactccgcaatctgaatcagctcttttggactggagatagagatcagccacatcaccagaaaaaaggccatcattgcggtcataaagtcggcataagcaatcttccacgatccatgtgctgccccgtggcttttggctttgcgtcgtttgacgacaataatcggatgcgcttgattcttcatgcttcctcggttgtcgtctgttgttgcggatttttcaccgcacgcacatgctcttccagttcaataaacgacggacgttcgctggaatagagcgttttgcgaccaaactcaacggcgataggcggtgcgtaaccgttcagattagatagcagtgtgactttgacgcactgcatcattttgctggtttcggcgcttttctgacgtaaaacactcgctaatggggaaataaatccgtaagccaataaaatgccgaggaaagtccccaccatcgcatgagcgataagcgcccccagctcggcggcaggacgatcggctgaacctaacgcgtgaactacccccattacagccgcaacaataccaaacgccggaagtgagtccccgaccagcgccagactgttcgccgggacttctgcctcgctttcgtgcgtctcaatctcttcatccatcagagcttcgatttcgaaggtgttcatgtgaccgctgataatcaggcgcagataatcgacgataaattcaagcatgacgctatccgcaaggatgcgtgggtagctggcgaagatctcgctctcacggggattttcaatatcgcgttccagcgaaaacatccccatctgccgcgatttcgccatcaaccgataaagcagagccagcagatccatatacattgctttggtgtatttggagcgacgaaacagcaacggcagcgccttcagcgtgcctttaatcgctttgccattattgccgacgataaacgacccaatccctgcaccggcaataatcaccagttcagcgggttgatagagtgctccaaggtttccaccggtcatcaaataaccgccgaaaactgtaccgagaacaaccaggtaacctaataagataagcacgacatcatccttccactgttgaccatgacaggatgttcagtcgtcaggcgttaacacgcgataggggcaaaaaaagcagcggtacatcgttaccgctgctggaatgtttcgccacaccgtatcagttaaacagcctgtactctctgttcatccagcagttgtgggataatatcggcaggattctgggaaagtttacgtctttttactgcccgggatggcggctgacataagctgcaggcaaagctgccaacaggctggtgagcatgggtaataaaatttccgccgcagcagttgcagctggaaagttgcagtaatccactttcaacaaaccgcaccaatgtccaggcacgggttaatgccagcagcggtccttcttctgcttgcgggcactgttcaaggtataaacggtaggctttgatcaccgcatcgacgccattacacaagccagttttcagtaaaaactgccatgcattacagaacatcgaagcatgaacgttttgttcccaggtcataaaccagtcggttgagaatggcagcatgcctttcggcggtgggcttccgcgcagttctttatagagttttatcagacgtccgcgacttaactgtgtttcgctttccagcatctgcaaacgagcgcccagggtgatcaattccattgccagctgaatatcccgcgcttcctgaacaatgcttttttcactcatgatcaggcccttttcttgcgcagcgcttcttcaggctgattaacatcattcagcaagcgagttgagagcatgatgccggtatgaatttgctggagatcgtcaacgcgggaatcttgcgtcaactgagtaatcgtctggtggctgtcaaaacggaagtgacaaaccagttgattggtttctgccagcttaaccatttgcggaagagtcagtgccgctaacgttgtcgccatttcttcatttatgccgagacgaaacatagcggacgctttgtcctgaacaatcagacgctgtgcaagtagtaaatatgacaagttgatgtcataaatgtgtttcagcaactcggaggtatgcattattcccacccagaataaccaactttatttttatgcggtctcaccgcaccccgtgatgtcgccgggaagccccggtaaaaaataattagcattagaatagttgcgataagctgcaataagcagacccacctttttggtttaataagtccttacaaatagaagggggtctttacacttatctaagatttttcctaaatcgacgcaactgtactcgtcactccacgcacatacaacggaggggggctgcgattttcaataatgtgtgatgcagatcacataaaacgctcaattacttaacataaatgtataagtcatacttttgttttgggtgtatttcaatctgttaaaaaatttttcgctacactggcaagcaaaaatgaaacaggaataatcgaaatgggatgttgcgcacagttaaaataactcaccgtaaataatcatctgctataaataatcgctttaatgcaataccagataagccatttttaaacaaacacttaccgcacaacaaactaattaactacaaagaaaggcaacaatcaacctaatgttaataaaatgttttacatatattaaccacttgttcaatatgggaaatcagtacattattttcttataaatacagttgaaatcatatgataaccaagagcaattgattaattgtatttactaatgaccagactaatatttacctgtttaactgagttgggattgcgtcgtttctccattaggagtaaagctttaatgtcacctgaagttcacagaataaggaacaggttatgagctatagcaatattcttgtcgccgttgcggttacaccggaaagtcagcaactgctggcaaaagcggtatctatcgccaggccagtaaagggacacatcagtttaattactctcgcttccgacccggaaatgtacaatcaattagctgcgccgatgcttgaagatttacgcaatgtgatgcaggaagaaacgcaaagctttcttgataagttaattcaggatgcggggtatcccgttgacaagacgtttattgcctacggtgagttaagcgaacatattctggaagtttgtcgcaaacatcatttcgatttggtgatttgcggtaatcacaatcacagtttcttttcgcgagcatcctgctcggcgaaaagagtgattacctcaagtgaggtcgatgtgctgttagttccacttacgggagattaaccgcacctacgcaagcttaggaaaggtagcaactttatcgcgctgctggctttccgcgcttcgcggaactatctgctttaggtcgctaatgaagcactcctgccagtggttaatatcgtttttcacgataacgtccagcatttctgcatgacgggaaatacgttccgccagcgacatagtcaatgcacgatccagcgcagctgcaacttcgtcacgatcgtagggattaacaattaacgccgacgttaactcgtttgccgctcccgcaaattgcgaaagaacaagaacgcccgggttggctgggtcctgagcggcaacatactcttttgccaccaggttcattccgtcacgcagtggcgtcactaagcccacgtcagagtagcggaatattttcatcagtaatttacggtcaaaatgctgattcaaataataaagcggcgtccagcctaattgcccatatttaccattaattcgtccggcttcattttcgagctgatgacgaatatcctgataggcttgcacatcaccacgagacgttggcgcgatctgggtataacgaattttaccgtgatgttgcggatatttttccagtaacgcttcataggcgagaaaacgctccggcaaacctttggaataatccagtcgttcgacagaaaagatattttgtacgtttttcagttctgctttgagttgcgccagttttggcggcagtggaccggcagcctgtttcgctatttctttcggctcaatgccgatcgggtaaacttccgttcgaaacgctttgccgcaggccgtatggctttttgcgctacgtgtcgtgacgcgggtcaggttagaaaggcaatccaggaacgccagacgatcgttctccgtctggaaacccagcaaatcataatcacaaagctgttcaagcaaggtgtcatatgtcggcagcgcgttgaagatttccggtgtcgggaaaggaatatgcagaaagaaaccaatgcgattattcacgccccgtttgcgtaattcatgcgcaaagggcaacaggtgataatcgtggatccagataatgtcatcgtcttgcaacagcggcagtaatttatctgccagcaacgcatttacgcgtagatagccatcccaggcaggacgctgaaattgcaccagatcgagccgataatgaaaagcgggccagagaacggcattggagaatttgttgtagtattcgtcaaggtcctgttcgctgaggttaaaagaggcccacgtaatgttaccctttttcaccttttttagcggctgatcctcattccctgtttcaccgctccagccaaaccacagtccacctgcggctttcagtgcccccagtatgccaacggcaaggccaccggcactggcggcgtgctcgtctggtggtgcaatccggttagatactacgactaaacgactcatagtcatcactcctgttattttctcttttttgttgtaatgcggtggttatcatttcaagccagctccagacatccggcacgcccgccagtcgccatgatgcctgagttgcacctgtgccaatttttactgacattccgcccagccggttaacgactgcgaagccagattcatcggtcagatcatcgcccagaaatacgggcgttcgcccgataaagggagcttcctgcataaaggcagcaatcgcctcacctttactggtacctttcggtttgatctcgacaacacactttccctgctgtaacgccatttgtggccagatctgagtaatacgttgcgctaatgtcattaatgcgtcttcatgctgcggagcctgacgataatgcagcgcaaaagccatccctttagcctccagctccgcgccgggatactgggcgatgaccgtatgcagttgcacgctaatatcacgcgcaatcgcatccggcagatgaacgatatgcgttttaccattgatgtcacggcgctccgccccatgcacgcccgctaatgggaagcgataaggttttgccagtgcatcaagctccaccattgagcgccctgatatcaatgccaatgcaccatcacttgcggttgccagtagctgaagtccttgcagaatagtgtcaggtacgacgacctgatcgggatgcggtttgatttccgccagcgttccatcgagatcaaaaaaccaggcatatttcgcggatagttcaggggtttcggttaacggttctgtcacccggttctcctccttctcttttcttattgtgttgcgcagaacgcgctttacagacatgtaagtatagacagtgtgacgggggtcgccatttgcaacgaagaacagccaaccgttgtggcggctggctgtggtgggaaaaaacgctaaattgttgtggaaaaaagcatcagacagtgcgtttcgctttttgcttgtaacggtcgaaaatcaccgctgccagcaggattaagccgcgaactacgtactgtgcgaaaggagaaatattaagcaggttcatggcgttttccacggtgcctaaaattaagatacccgccaccacatatgagatttttccgatgccgcctttcagagaaacgccacctaaaacgcaggcggagatcacaatcagctcatagccaatcgacgtcattggctgcccactggtcatacgtgaagccagaataattccggctatcgctgataccaggccagagagaacaaagataataattttggtgcgaacaaccggtacacccgccagacgcgcagcctcttcgttcccgccaatcgccagggtattacgaccaaaggtggttttattcagcagcaagccaaagatgatcagacacgcgacggtgagccagattggcgcaggcagaccgaaccagttggcgtaaccaagggcaaagaagctttcatcttcgataccgaccgctttaccgtctgaaatgatgtacgccagacctcgaacaatctgcatcgttgccagtgtcgtgatcagggcatttattttgagtttggcgataacaaagccattgaccagaccacagagaatgcccagcagcaaccccgctgccacgccaatccacaggctttcagtcagattaataaccaccgccgtggtgacacccgcacaggcaattacggaggcgacagaaaggtcaaagtcaccggaagcaaggcagaacaacatgccacaagccaccatccccgacatggaaattgccaggcccaaccctttcatattaatgaaggtggcaaaatttgggacaaaaatggcacaggcgataaaaagcaccgcaaacaccaccagcatgccgtactgatcccagatacgcccgaagctgaatgacgacttaggtgcgccagaacccgatgtagaaacagaagacatcatactctccttactcaggcaactgcctggctgactttaggcatcgcaaggctcagtgcctgacgctcatctgcctgctcgtgtaacaattcaccggcgatttcaccttcgcgcatcaccacaatccggtcggcaacgccgaggacttcaggtaagtcgctggaggcaaacagcaccgccaccccctgcgccgccagcgcataaatcacgttatatatttcgtgcttagcaccaacatcaatgccgcgcgtaggttcatccagcaaaatgaccttcatctcttccgataaccagcggcccagaatggctttttgctgatttccacctgagagattcataatcagttgctcagcgcccggcgttttgatgttgagcgaacgaatgtggtgatcggcattgttttcttcccaaccgttgttgattacacaacctccaagcacatgtttacgtctggcactgatgttgatattgtcgcgaacggagtgcacgggaataatgccttccgctttgcgatcttccgggcagagcatcatgcctgcggcaatggcgtggctcggtttacgaatatcgatcggctgttggtcgatataaacctgaccggcggtgatttgcgtcccgccaaacatgcctttcattaattcgctacgccctgccccgaccagaccaaacagaccgacaatttctccactgcgaaccgccagacttattggcgtacgcacgcctggtgctttcacagcatcaagacgcagccgctcctcgccataactacgcggttgccagccgtagatatcgccaatgtctcgcccgaccatcgcctgcaccagtgcgtcgtggtcaacctgctgcatatcggtaaaggttttgacataacgcccatctttaaagacggtgatggcatcgctgagggcaaatatttcttccatacggtgagaaacgtataagatcacccgcccctcttttcgcagttcacgaataacgcggaaaagattgtcgatttcgcgggcagagagggagctggttggctcatcaaaggcgataattttggcgttacgcgccagcgctttggcgatttcaaccatctgccactgaccaatggagagatatttcagcggcgtgtccgggtcaatatccataccaagatgtttaagttgtaaacctgcctcataattcagcaatgaacgattcacaatgccgcctttatgcggcagctggccgagatagatgttttccgcgacggtcatttccggcacgagatgcagttcctggtaaataatcgccacccccgcgttaagtgctgcggtcgtgtcggaaaaggacatttcctgcccattaatcactacagaacccgtggttggcgcatagtttccgctgaggatttttaagagagttgattttcctgcgccattttcacccatcaacgcatgaacctgaccggcatagcagtcaaaactaatatccgtcagcgccttaacgccgggaaacgttttaccgatgccgcgaaatgagagatacggggtagactgttgcataacgtctccgtgaatcactggtcgttcacaccccctctgcatcatgcagaggggaatttttccggcaaattacttaccacctaaaccttttttctccagttcttctttaaagttgtcacgcgtgatcagcaccacgtcggtaacttcggtgaatttggtcggttcaacaccttttgcaacccagttgtaaagcatttcgctggacttataaccatgtacgtccgggcttggcagcagggaaccgtagaagccggttgcctgtgccttagacagttcactcaccgcatccacaccgttaataccgataccgatgatattgctcgctttaaagccctgaccttccgtcgcgcgtacgccgcccagcacggtgctgtcgttcataccgacaatcagccaatgtttaacttccggatgttgaaccagcattgagttggcagcgtcaaatgcccccgggatgtcgttagatttggtaggtacctgataaatttgtttttccgggaatcctgcagctttcagcgcatccatagaccccgtagtacggcgacgagccgtatccagttcgttggaggtaatcgccatcaccgcgctttctttgacatcccagccacgtttctgcatctctttatacagttcctggccctgacgttcgccaattttggtcgcagccatcatcaccagcggaacggtatccattggcttacctttggcgttaacaaactggtcatccacggcaatgactttcatatcgtagccacgcgctttcgccacgatggcagagccgagtttcgggtccggagtacaaataacgaaacctttcgcgccactggcagccaggctgtcgatagcgttcaatgttttttcgccatccggcacggcaatcttaataacttcaaaccctaaatccttcccggctttatcggcaaacttccattcggtctggaaccacggctcttccggttgctttaccaggaaaccgagcttcaggttctccgccatagcggattgtgacataacggctgccagaccaatggctgccagggctttagtaaatttgtgcatggttctctccagctttagtgtcgttttgtgtagggcaaaaacgaatgacattcgttaaattaatcggaaaacaaagcattaccttttaactaaaagataagtgactgtgttgacatagttttagcgagaaattaattctccataggagagcaatatcacatcgcagaattacagtgagaacgtgcataaatttagcgggaaaagacataaggaaaagcgaatttgtcagacaaattatcgagtgcacagcagaataatccataagattagcctggaagtccttgttgtctttggtacccatgcgggatgttttctttttaaccagtcaataggcctcattacctggcgttgagtttttgcaatggtgtaataaccgcaacttaaagatgtggaaaatgcgcgtcattcatttcgccattaattatcactgtactcattaattaacagaacacgtataatgagagccatatcgcaaaaatgaaaaaacgttttataaaatcattgcttcatcatgaattcaaattcatcgattaatatcaacaagatacaaaaagcaccatcattaaaattcattacagttacattgatttcatcaatgaaatgtaaaaatatataaacttgatgatttaagcattttcttatacccgttcagacgttattcttatttcagatcatcgtcagaattgactccacgatcacatttcggaccggcagaaaggaattattctgcaaacagtaattatggtgttttgatttatcttgcacctctccacttctggatataaggatattaggtatggcaaccgctggaatgcttctcaaactcaactctcaaatgaaccgcgagttttacgcatccaatctctaccttcacctgagtaactggtgttctgaacagagtctgaacggcaccgccactttccttcgcgcccaggcacagagtaatgtgacccaaatgatgcgcatgtttaactttatgaagagtgtcggcgctacccccatcgttaaagccattgatgttcccggtgaaaaactgaactctctggaagaactgttccaaaaaacgatggaagaatacgagcaacgttcaagcacgctggcgcagttagccgatgaagcgaaagaactgaatgatgattcaaccgtcaatttcctgcgcgatctggaaaaagaacagcagcatgatggcctgttactgcaaaccattcttgatgaagtgcgcagtgcgaaacttgctggtatgtgtcctgtgcagaccgaccaacatgttctgaatgtcgtgtcgcatcagctgcattgatcatacatcggcgccaatgcattgcgccgatgaagtttttgagaaaccgctgcctcatttttttgaagcagcggttttttaatgggattcgccctgtggggtaaacttgagttcaatcaacgcgatggctttttggattgcccgcatggtgaccgggtctgcggcggcgggatggttagtaaagtcgatattcttcagctggctggacattttttcgcgaacttcaacgggcgcgatcacatcgagaacatccagaatttgtttgataaccaactggcaagcaaccacatcagaaaccagttcctgatcggcattcagcggctgggacatcgtaaactcctgatagcattttgaaagccgttatagtagcggcttcacatcttcagcgatagtcacatccaccgtcatcagaacacaaaaaaacctgccggagcaggttttttgttatcggaacatattgcctggcggtacgtctttgaacgtcttgcaatagttattgaacatacttttcaggatcttgcgcagtttcatcgcggtactccgaccatttgttatacaggtgttattgtctttgcgtttataatatgacaaccatcacaaaaatcaatctttatgtgatgtaaatcacataaatacccctttaatgttataaaaatgataatcaaaaagcagccccccaatttctgacacatacagatggcaagaaatagcgcctgccaggcgtcttttccggccattgtcgcagcgctgtaacgcgtaaaatactgctttcttttactcttctggctggaccatgagacttctgattctgactctttccttaataacgctgacaggatgtacggttactcgccaggcccatgtgagcgaagttgacgcggcaacaggtattgttcggttggtttatgatcaggcttttttgcagcatgcccgtaccgatcgttatgtcagtcgcgggatcgccgatcgcgcatgccagcaggcaggctatacccacgctatcccctttggtcagccagtaggcaactgtagcctctttgcgggttccttatgtttgaatacggaattcactttgtcatatcagtgccatcattccgccttccctgtctttctctaaacgttttaatcagcgagggggatcttcgctgattaaataaatagcggtaatgcgttttattcccattcgtatttttaataaatgatgtttatattttaccttttgcaaataataaaataacaaattatagtgacgccacagcaacaaatataacctttgtggagcactatcatgctgaaaccagaaatgattgaaaaacttaatgagcagatgaacctggaactgtactcttcactgctttatcagcaaatgagcgcctggtgcagctatcataccttcgaaggtgctgccgcgttcctgcgccgtcacgcccaggaagagatgacgcatatgcagcgtctgtttgattacctgactgataccggcaacttaccgcgtattaataccgttgaatctccgtttgctgaatattcctcacttgatgaattattccaggaaacctataaacacgaacaattaatcacgcagaaaattaacgaactggctcatgctgcaatgaccaatcaggactacccaacatttaatttcctgcaatggtatgtttctgagcagcatgaagaagagaaactgttcaaatcgattattgataaattaagcctggcaggcaaaagtggcgaaggtctgtattttatcgacaaagaactctctaccctcgacacacaaaactaatgctctccggcggcaggttttctgccgccgtttcaaatcagtgacggcaaatcttactctgatcggttgaaaaaccttcttctgaaggtataaatttgccttttgctgccagaaacgccaccaactctcccgcagtcatcccttctgccgagcaggtgtgaaaacgtgcctgttcaccaaaacgcgctttaattgctgcttccagactggcatgcgtatattgctcgcttgattcaatcatcatatttaacacttcatgaccgtgaatagagtccatcgttcctcctcaaaaaaagcctagcgtagcgattgctgcttatgaagactttgcgccagcgcagaactgaacgctttttattgtacatttatatttacactatatgtaacgtcggtttgacgaatcagccgttatgccttaacctgcgccgcagatatcactcataaagatcgtcaggacagaagaaagcgtgaaaaacagaactctgggaagtgtttttatcgtggcgggaaccacaattggcgcaggcatgctggcaatgccgctggctgcggcaggtgttggttttagcgtcacgttaatcttgttaattgggctttgggcattgatgtgctacacggcgctattactgctggaggtgtaccagcatgtcccggcagataccggtctgggcacgctggcaaaacgctatctgggacgctacggtcagtggctgacgggcttcagtatgatgttcttaatgtatgctctgactgcggcatacatcagcggtgccggtgaattgttggcctccagcatcagcgactggacaggtatttcaatgtcggcaaccgctggcgtgctgttgttcacttttgttgccggtggcgtggtttgtgtcggaacttcgctggtcgatttatttaaccgttttctgttcagcgccaaaattatttttttggtggtgatgctggtattgctgctaccgcatattcacaaagtgaatcttttaaccctgccgttgcaacagggactggcactgtctgcaatcccggtgatttttacgtcgtttggttttcacggtagcgtgccgagtattgtcagctatatggatggcaacattcgtaagctacgctgggtgtttataatcggtagtgcgatccccctggtggcatatattttctggcagctggcgacccttggcagcattgattcaacaacctttatgggattgctggctaatcatgccggattaaacgggctgttacaggcgttacgcgaaatggtggcctctccgcatgttgagctggcagtgcatttatttgctgatttagccctcgccacgtccttcctcggcgtagcgttaggcttatttgattatctggcagatttgtttcagcgttcaaataccgttggtggacgattgcaaactggtgcaattacctttctgccgccactggcgtttgcactgttttatccacgaggatttgtgatggcgctgggttacgccggtgtggcactggcggtactggcattgattatcccttcgctgttgacctggcaaagcaggaagcacaatcctcaggcgggttaccgggtgaaaggtggtcgtccggcgctggtggtggtgtttctctgtggtattgctgtgattggcgtgcaatttttgattgcggcaggcttgttaccagaagtgggatgattagatagcctcaaattccttattgggtgccagaattaacgctgacacccaatgtgacctcttaatgcaggcagcactgcttaaatttcttaccactaccgcacggacaaggatcgttacgccccggtttctcttctgctttgatcggttgctgaacagctttttcctgcggatgcgccatccagtatgcatgtaaatcaagcgccgccagtcgaattgcatctacgctctcttcaaacgcttctggcgacatcttctctacccgctcgaagttttcctcagtaccgtgcagcgcaatcgcctccagcgctggttttaacgaatcgggcaacgttgaccagtcagaaagtgccacgccccgcatatagccaaagcaccactcctcaacaatcgtcagctcgctgccatcgacttctcgcaagccgaataacggctcaaactgctccgggaattcgttcagacgctctgcggtatcggccatatgttgaaaagccaggttcataaagcgcgtcatctctttctctgacgcccagcgcggcacatagtcagccccaccccacacggcaaccagccactgtgccggttcaatctcttgcggagaactcaacaccgccgtcaataaaccgtccagctccgccacatcaagaatggcgtggtcagtgttgtatttggtcagaatatcgtccagccattccaactcactttcgtttaacggtcccgttttcatacgcttttccttgtggatctcaactcgccagcacctatcttacatgccggtccgtatcagagatactttttgagtggctttgccggtgattaaaaattaaggagggtgtaacgacaagttgcaggcacaaaaaaaccacccgaaggtggtttcacgacactgcttattgctttgattttattcttatctttcccatggtacccggagcgggacttgaacccgcacagcgcgaacgccgagggattttaaatcccttgtgtctaccgattccaccatccgggctcgggaagaaagtggaggcgcgttccggagtcgaaccggactagacggatttgcaatccgctacataaccgctttgttaacgcgccaaattcttcaggcctttcagccagacatccgctgacgccgatgccttttaaactggagcgggaaacgagactcgaactcgcgaccccgaccttggcaaggtcgtgctctaccaactgagctattcccgcattcatcaagcaatcagttaatcacttgattttattatcgtctggcaatcagtgccgccgttcgatgcgttgcattctacttacctggcgcgatgagtcaacgatatttttcaccacttttgatcgtttgctgaaaattgcgccgaaacgatcactgatcaagcaaatctgcacgcgcagcgctcaaatattgcaacattgaccacagagtcagtaccgcagccacaaagaaaagtgcaataccggcgtactcaacccaaatgttcggacgccacagcagccaggctaacgccaccatctgggcagtggttttcactttcccaatccaggagacagccacgctactgcgtttacccaactccgccatccattcgcgtagcgcagaaataataatttcacgggcgatcatcgttgctgccggtaaggtcacccaccagctgtggtaatgctcggttaccagcaccatggcgatagccacgagaactttatctgcgacagggtcaaggaaagcaccaaaccgggtactctggttccagcgacgtgccagaaaaccatcgaaccagtcagtcaccgccgcgacgcagaaaatgagcgcggcggcaaacggcgaccaggtgacaggcagataaaagaccaatacaaagaatgggataaggatgacacggaacagtgtaagcaacgtagggatattaaattgcataatgacgggtaactatctgttgtcagtaagattacccctatgttgctacagagacatcaatgtttcaacgaccagaagatcttttctgccagaccttgcgaaatacccggcacttttgcaatttcctcgacgctggcgttacgtaaaccttgcaaaccgcccatatatttcaacaacatttgccgacgttttggcccgacgccttcaatggtttccagggaactggtatttttgaccttcgcccgttttttacggtgcccgccaatcgcgtgatcgtgtgattcatcgcgaatatgctggataacatgcagcgcgggagaatctggcggcaaactaaatccctcaccttccggctcaaagaacagcgtttccagcccagccttacgatctgctcctttggcaacaccaagtagcagcggatgatttttatcccatgagacatccagttcggcgaagacatttttcgcctgcgcaagctggcctttgccgccgtcgataagaatcacatccgggatcttactgtcgtcaatggctttaccataacgccgacgcagcacctgattcatcgccgcataatcatcgcccggcgtgatgccagtaatgttatagcgccgatactccgcacgcagcgggccgttagcatcaaacaccacacaggaagcgacggtttgttcacccatggtatggctgatgtcaaagcactccatccgcttcacttccggcaatttcaacacgctggcaagcgcggtcagccgctggtgaacggtagattgctgcgaaagtttgctggttaaggccgtcgccgcattggtgcgcgcgagtttcagataacgcgctctatcgccacgaggtttggtttgaacattaatcttgcgtcccgccagttctgaaagggaatcggcgagcagcgttttatcgctaagattaaaatcgagcaggatctcacccggtaaggtgcgcatctggctgccttgtaaatagaactgacctacgaaggtttccaccacctcgctcagttccgtaccgccaggcactttcgggaaatagctgcggctgccgagcactttgccctgacgaatgaacaatacgtggacacaagccatacccgcatcgaacgccacaccaataacgtcaaggtcgtcgccggtattggaaacaaactgtttttcggtgacacgtcgcaccgcctgaatttggtcgcgaatccgcgccgcttcttcaaactccagattctggctggcagtttccatacgactaatgagttgcgtaagcacctgatcatctttgccagacaaaaacaggcgcacatactcgacctgctgagcgtattcttcttcactcaccagtccttcaacgcacggccccagacagcgccctatctgatattgcagacacggacgcgagcggttgcgataaacactgttttcgcactggcgaatggggaaaatcttttgcagtagcgccagtgtttcacgtacggcatagccattcgggaacgggccgaaatattcacctttggcatgcttcgctccacgatgcatcgccagacgcgggtgggtatcgccactcaggaagataaaaggatatgatttatcatcgcgtagcaaaacgttgtaacgcggctgataaagtttgatgtagttgtgttccagtaacagcgcttcggtttctgtatgagtaaccgttacatcaatttgctggatctgggcgaccagcgcttcggttttgcgcgaagcgaggttgctacggaaatagctggaaagccgttttttcaggtctttcgctttgccgacatagataaccgtaccaccagcatcgtacatgcgataaacgcctggctggctggttacggtttttaaaaacgcttttgcgtcaaactgatcactcactgacttgataatgtctccgcattacacagaccatggcgaattgccaggtgagtcagctcaacatcgccatgaatgtttagtttactgaacatacgatagcggtagctgttcaccgttttcggactgagattgagctgttctgagatctcattgaccttctggcccttggtgatcatcagcataatctgcaattcacgttcagacaaactggcaaatgggctttctgttttttctggttcgatctggcttaacgccatttgttgagcgatatcagaagcaatgtaacgctgccctgaatagacagaacgaatcgcactcacgacttcctgcggagccgcgcctttgctgaggtagcccgcagctccggcctgcatgactttcgctggtaaagggttttctgtatggacggtaagcatgatgattttgacatcagctgtggaacgcgcgattttacgcgtcgcctcaagaccgccaatgcccggcatactcatgtccattagcaccacgtcaacggcatttgcccggcaccatttaacggcgtcttcaccgcacgatgcctcaccgacgacttttataccctttatatcttccagaatgcgtcgtatccctgcgcgcaccagttcgtggtcatcaacaagtagaacgttgatcaaaggaatatctccagaaatagggataacgctactgatagttagtcattcgtatattagcggtttttattgcaactttgaaacgttaaaaatggtgggtattcgatttttctctcgtttttgtcaattcgattgtccacagttatggtcacgcccgtcaccaacggcttccgggatcgtttcacagtaagcccggcgatgaaatgtgacaaaaattgactttattcagcaaaaatgaaaatcagcccgctgaatatgtaacattaattaacccgaacaatacgggcaaaaaacattcatgataaaaatatttattggtcattatattaacgtattttatagtactgttgatatcgcgctcaaaaaacaaccactgctatttttagcaaagcttatggtatactccgccgccttaacatttttcaccgcaaattttcattgcaacatgacgaggaaaataaatgagtacgcctgatttttctactgccgagaataatcaagaactggcaaatgaagtctcctgcctgaaagcgatgctgacgctgatgctgcaggcgatgggacaagctgacgcgggccgcgtgatgttaaagatggaaaaacagcttgcgctgatcgaagacgaaacccaggctgcagtattttccaaaacggttaagcaaattaaacaagcctaccgtcagtaatataaaaccggctgagagcgtgcctttcagccggtttttgcatctggcacgcagaacagaaaagagatcaaattaagccagtagcggccgcgtaacaggcaacctgcgtcttattcggtgcattgatttttttctgcatgtttttctgatggaaattgaccgtattctcagagattgacaaaatcatcgctatctctgctgatgtcttaccttccgccgtccatttcagaatttctttttcgcgcttgctgaaattcatctctggcgtcatcactatttcatcatttaaacgcatcagagccatcagactttcgcgcaccagtagctgcatttttaattgcagttcatcactaagaatgggtatttcgcgcgtgctgcaacgggaaaaggacaaaaagcccaacgcccgatttggcagcattaaatactgagtgacaccgcggcgtaaaccatgtgcgcgcgcagcttcccataacggctgtgcttcgctgaataagtcatcattccacattaaatggccctgactaaagttttcagggttcagcaccggatcaattgcgagaaaattttttgcctgataataactaacccacgactcagggtaattggtgtagaaagccactttaggtcgcgtgaatggtaccgggtggcgaacacataacgaatagtaatcgtactccagctgctgagcctgaagctctatttcatggtagacctcttctgcggcctccatcctctgaaaacgcaacaacatcgtgcgaagccagctgaaaaaatccgtatcctgcatagtaaaccgcaacgcccctgagagtgagtatcatttataatgataattcaaactatcacataaataagatttatatataatttatattattcaggcaatgaattacttttgcaagccatcgcattctcttatgttattaatgagttatgctgatttgttaagcagttttatcacgtttgaaatggcgtcccgccccgactggtgaatcgtcggggctgattttttcttattattgcagcagaaacttctccaggaactggcgggtgcgaggctgctgaggatcagcaaataacgcttttgctaccccctgctcgactatccgcccctggtccataaaaatcgcccggtccgcaacatcccgggcaaagctcatttcgtgcgtcacaatcaccatcgtgcgcttttcctgcgccagctgacgaatggtgttcaggacttcgcccaccagctctggatccagcgccgacgttggctcatcaaacaaaatcacttcaggacgcattgccagagcacgcgcaatcgcaacgcgctgctgttgaccgccagacaaacgacgtggataactggtttctttaccggccagcccaactttcgccagcagctcgcgagcgcgcgccgtggcctcttctttcggttcgcctttgacgatcaccggcccttcaataatgttttccagcaccgtacgatgcggaaacagattaaagttctggaagacaaacccgacgtgctgacgcaactggcgaatcagcgatttttgctgacttaatgaacgtgcagtatcaatagtgatatcgccaacggtgatggttcccgcttccggttgttccagcagatttatgctgcgtagcaacgtggttttgccggaaccactcggaccgataatagccactacttcgccaggcttcacctcaaggtcgataccatgcagcaccgtctgaccgtggaattttttcaccaggttcttaacttcaatggcactcatttgggttccctctcctggcgattaagttgattctcaaaatggttctgcaacgtcgataacacagtcgccataatccagtagatgagcgaagccgccaggtacatggtgaacacctccagcgtgcgcgaggtaatcaactgagcctgacggaacagctccggcacctggattgtcgcggccagcgacgtatcttttaccaggctgataaagctgttcgacagcggcggcaacgccacccgcgccgcctgtggcaaaatcgcgcgacgcatggtctgccatggcgtcatgccaatactggctgcagcttcccactgacctttatcaatagaagaaatggcggcgcgcagcgtttcggcagcataggcggcagtgttcagcgacagaccaatcattgctgacggaatgggatctaattcgataccaaactgtggcagtccgtaatagatcataaacagttgtgcgatgagcggcgtaccacgaaaaatagagatataaaaacgcgccagccagcgcacgggccagattggcgacaggcgcatcagcgcgagaataaacccgagcagtaagccaaaaaacatgccgccgatactgagttgcagcgtatacccagcccctttcagcaggaacggcaaggaatcaataaccagttgtatactttcttgcatgagcgttcccggagctaaacgtggggatgataggcgaacagcgcaggcgcaccgccggtatgaataaacaaaatcggcccttcatctttgaagcgtttctgactgataccgtcaatcagccccgccatcgcttttccggtatacacaggatcaagcagaatgccttccagccgcgccagcaatttcactgcttccatgccttcgtcgttcggcacgccgtagccaggtgcaaaatagtcatcccagagtaaaatttccgctgatgcggtcagctccagttctttcgcaatcgcctgttggaggttaaccactttcggcaattgatcggcaacagaacgcgacacagtcacgccaatcagttcgctttcaggcatcaggtgttccagcccaacagccagtccggcgtgagttccggcactgcccgacgcgaccaccaccgacgaaatattaactgccccttcacactgttgcgcaatttccagcgcactctccacataacccagcgcgcccaaagcattagaaccgccaaccggaatgacatacgggcgaaagccttgtgcttcgactcgcgtcgccagcacttccagttgggcattgggatcggtcagtgcgtcgcacatttcaatctgggtattgaacagatccagcaacaaacgattgccgttggttaaatagttttctgcggttgtgccaataggattttccagcagcgccacgcagtgcagaccgagtttcgccgcaactgcggcagtctggcgcacatggttagactggatcgccccggcagtaatcagcgtatcggcaccttcacgcagagcatctgccgcgagaaattccagcttacgtaatttattgccgcccattgccatgggagtgacgtcatcccgtttgatgaaaatttcccgtccaagataatcagaaaagcgcggcagatattcgagcggcgttggcgcgccgataaactccagccgtggaaaacgggttaaattatgcagtggcataacagcctccgatgtgtgttgttgtgattttcttattatgcacgctgaaaacgcgtaaaataaacaataaaaaaggcgctagtgaaagcgcccttttttgtcattatgctgattatttggtcacatcagcaccaaaccatttttcggaaagggcttgcagagtgccatctttttgcatttccgcaattgcatcattcaccgctttcagcaggtcttcatttcctttacgcagcgccacaccagactcctgacgggagaatgcttcaccggttactgccagcgtatcgttggttttcttcaccagatccagcgccgccagacggtcaacgaggatcgcatcgatacggcctacgcgcagatcctgatatttggtcgggtcatcatcataggtacgcacatcgacgccctgaacattctgacgcagccactcttcatagttggtgcccagaccgacacccacttttttgcctttcagatcatcagccgttttaatggtgccttcgttaccttttttcaccagcgcctgaataccggaaatggtgtacggggtagagaaatcgtattttttcttgcgctcgtcagaaatggtgacctgattaatcaccacatcaatgcgtttagagtccagcgacgccagcataccgtcccatttggtcggttttagtgacgcctcaacgccaagatgttttgccagctgttgggcaaattccacttcaaaaccggttaatttgccgtcatccccctgaaaactgaacggcggataagttccttccagccctaccagcagcgtgccgcgctctttgactttattaagcagaccttcatctgcaaaacttttaacgctcatacccgcaaccagcgccacggccatcacacccatcaatgcctgacgtcccagatgtgctaatttcatatttaccccgaatgttgttatgtctgtttgcagtgtagagccattgtttgtaaacacaaaaacaactccgctacatcttattcttatttaatatatatcagaagcaggcaggctggaggatttctgcacaagtccggtacaggtttggcgctgatagtgttgatacttccgtaacgcgatgcggtaattgttggtgctggtggagggcagccacggggcgaggatttcatcaaggaaaccgtcctgcagctgatcgagggaaatattttgctcgtgtagatgattccccaaacggcgcaaacgaacgacatattcacgcaccgtaccagggctcatttcagtttgctcaaaaagaaattgcttaaagccgataatatcgaaaaaatcactctgcgttttgcaatgtaaatcaccgcaaaatcggcacaatgccgcccatgattgttgttccacttgccagccattttcatcaagcagcgtgtccaggcgggaaatctcgattttattcactattttgccgtcgcgaacgagggtaatgcgatcgagtaatttacggcaatgcgcgcaatgggtctggctgtgtttaaagtctttaagatagcggcttaatggccgtcttttcaggtgctgcaccatcattaagaactcctggtagtcaaaattaaagtgcggcatttactgacgttataacttacccagtttagtgcgtaaccgtttaatagcctggctgtgtaactgactgacccgcgattccccgacctccagcaccgcgccaatctctttgagattcagctcttcctgataatagagggttaataccagtttttcgcgctccggcaacgtttcaataaaaaaggcgctagtgaaagcgcccttttttgtcattatgctgattatttggtcacatcagcaccaaaccatttttcggaaagggcttgcagagtgccatctttttgcatttccgcaattgcatcattcaccgctttcagcaggtcttcatttcctttacgcagcgccacaccagactcctgacgggagaatgcttcaccggttactgccagcgtatcgttggttttcttcaccagatccagcgccgccagacggtcaacgaggatcgcatcgatacggcctacgcgcagatcctgatatttggtcgggtcatcatcataggtacgcacatcgacgccctgaacattctgacgcagccactcttcatagttggtgcccagaccgacacccacttttttgcctttcagatcatcagccgttttaatggtgccttcgttaccttttttcaccagcgcctgaataccggaaatggtgtacggggtagagaaatcgtattttttcttgcgctcgtcagaaatggtgacctgattaatcaccacatcaatgcgtttagagtccagcgacgccagcataccgtcccatttggtcggttttagtgacgcctcaacgccaagatgttttgccagctgttgggcaaattccacttcaaaaccggttaatttgccgtcatccccctgaaaactgaacggcggataagttccttccagccctaccagcagcgtgccgcgctctttgactttattaagcagaccttcatctgcaaaacttttaacgctcatacccgcaaccagcgccacggccatcacacccatcaatgcctgacgtcccagatgtgctaatttcatatttaccccgaatgttgttatgtctgtttgcagtgtagagccattgtttgtaaacacaaaaacaactccgctacatcttattcttatttaatatatatcagaagcaggcaggctggaggatttctgcacaagtccggtacaggtttggcgctgatagtgttgatacttccgtaacgcgatgcggtaattgttggtgctggtggagggcagccacggggcgaggatttcatcaaggaaaccgtcctgcagctgatcgagggaaatattttgctcgtgtagatgattccccaaacggcgcaaacgaacgacatattcacgcaccgtaccagggctcatttcagtttgctcaaaaagaaattgcttaaagccgataatatcgaaaaaatcactctgcgttttgcaatgtaaatcaccgcaaaatcggcacaatgccgcccatgattgttgttccacttgccagccattttcatcaagcagcgtgtccaggcgggaaatctcgattttattcactattttgccgtcgcgaacgagggtaatgcgatcgagtaatttacggcaatgcgcgcaatgggtctggctgtgtttaaagtctttaagatagcggcttaatggccgtcttttcaggtgctgcaccatcattaagaactcctggtagtcaaaattaaagtgcggcatttactgacgttataacttacccagtttagtgcgtaaccgtttaatagcctggctgtgtaactgactgacccgcgattccccgacctccagcaccgcgccaatctctttgagattcagctcttcctgataatagagggttaataccagtttttcgcgctccggcacaataaaaaaggcgctagtgaaagcgcccttttttgtcattatgctgattatttggtcacatcagcaccaaaccatttttcggaaagggcttgcagagtgccatctttttgcatttccgcaattgcatcattcaccgctttcagcaggtcttcatttcctttacgcagcgccacaccagactcctgacgggagaatgcttcaccggttactgccagcgtatcgttggttttcttcaccagatccagcgccgccagacggtcaacgaggatcgcatcgatacggcctacgcgcagatcctgatatttggtcgggtcatcatcataggtacgcacatcgacgccctgaacattctgacgcagccactcttcatagttggtgcccagaccgacacccacttttttgcctttcagatcatcagccgttttaatggtgccttcgttaccttttttcaccagcgcctgaataccggaaatggtgtacggggtagagaaatcgtattttttcttgcgctcgtcagaaatggtgacctgattaatcaccacatcaatgcgtttagagtccagcgacgccagcataccgtcccatttggtcggttttagtgacgcctcaacgccaagatgttttgccagctgttgggcaaattccacttcaaaaccggttaatttgccgtcatccccctgaaaactgaacggcggataagttccttccagccctaccagcagcgtgccgcgctctttgactttattaagcagaccttcatctgcaaaacttttaacgctcatacccgcaaccagcgccacggccatcacacccatcaatgcctgacgtcccagatgtgctaatttcatatttaccccgaatgttgttatgtctgtttgcagtgtagagccattgtttgtaaacacaaaaacaactccgctacatcttattcttatttaatatatatcagaagcaggcaggctggaggatttctgcacaagtccggtacaggtttggcgctgatagtgttgatacttccgtaacgcgatgcggtaattgttggtgctggtggagggcagccacggggcgaggatttcatcaaggaaaccgtcctgcagctgatcgagggaaatattttgctcgtgtagatgattccccaaacggcgcaaacgaacgacatattcacgcaccgtaccagggctcatttcagtttgctcaaaaagaaattgcttaaagccgataatatcgaaaaaatcactctgcgttttgcaatgtaaatcaccgcaaaatcggcacaatgccgcccatgattgttgttccacttgccagccattttcatcaagcagcgtgtccaggcgggaaatctcgattttattcactattttgccgtcgcgaacgagggtaatgcgatcgagtaatttacggcaatgcgcgcaatgggtctggctgtgtttaaagtctttaagatagcggcttaatggccgtcttttcaggtgctgcaccatcattaagaactcctggtagtcaaaattaaagtgcggcatttactgacgttataacttacccagtttagtgcgtaaccgtttaatagcctggctgtgtaactgactgacccgcgattccccgacctccagcaccgcgccaatctctttgagattcagctcttcctgataatagagggttaataccagtttttcgcgctccggcaacgtttcgatggcttccatcacccgctggcgcagattactgtccagcagttgttgtagcgggttttctcgctgatgatcatcagtaaccagttcgatgctatcgccgtgctcttcgcgccactcatcgtaggagaagagctggctgttattggtgtcgagcaacatttggcgatagtcggcaatatcgatccctaaacgttccgctacctcagtttccgtggcgttgcggccaagttcctgctccagttgccctattgcctgtgccacttcacgcgcgttgcgtcgcacgctgcgcggcacccagtcacggctgcgaagttcatccagcatagcgccacggatacgctgcactgcgtaagttgtaaatgccgttccttgtagggcgtcatagcgttcgacggcattaagtaacccaatgccgcccgcctgtagcagatcgtcaagttccacgctcgcgggcagtcgaacctgcaggcgcaatgcttcgtgacgcaccagcgggacataacgctgccacagcgagtgtttatccattacaccttcagcggtatagagtgaattcacgataaacagccctgcgttatatgagttatcggcatgattatccgtttctgcagggtttttaatcggacgattagtgggtgaaatgaggggttatttgggggttaccggtaaattgcgggcagaaaaaaccccgccgttggcggggaagcacgttgctggcaaattaccattcatgttgccggatgcggcgtaaacgccttatccggcctacaaaaatgtgcaaattcaataaattgcaattccccttgtaggcctgataagcgcagcgcatcaggcaatttggcgttgccgtcagtctcagttaatcaggttacggcgattaaccctgcagcagagacagaacctgctgcggtacctggttggcttttgccagcacggagttaccggcctgctggataatctgcgctttcgacatgttggacacttcggtcgcatagtcggcgtcctgaatacgggactgcgcttcagacaggttggtagtggtgttgttcaggttggtgacggcggaatccaaacggttttggatagcccccagggatgaacggaatttgtcgatggagctgatagcttcatccagagctttcagtggatcttttgttactgtgccttcgctagttgcatctgttgttaaagtaccattagcactaacatatacttcagccccgactttcggcgcatatttacccgtaccagttccagaatcaacagttaccttgccgttgttagcatcgattgaatacttcgtggtgtatgaaccaattgtagtcatttcaccatcagcatctgtgtatgttgctgttgcattagaaacgtcagtattatcggcatattttgcgctagcagtaccgtcacctgcggcaaataccgcctgatacgtctgaacgccagatttataggtaattgttgcggatgtatcaccgttagctgcaactgctgtgccttgtttagctgtagccactttatttaaaacggtttctttgctagctgtatcagtgaacgatacccctgcgttagcagttgcagcaccagcatcagcacccgttttaaagttataagttgttccccccatcgtgactgatgcagtcttattaaacccgattgattgaccatcaccagctttcttgaataaaccatcaagcgtagccgcagtcgcaccaccagcatcgtttgtagttaagttaccatcactagttaaataggcttcctgtcctccgattgtaattttaccattcgcatcaacatcaaagttcacttcaccgcttgctgctttgtaaacaccactagcagtttgcccagccggcgggagaaggctagctgctacatcacctgcttttgctgaagtattattcgatacattactgaatgagaagttaccagcagatgcattgtatgtatagaccgtggcagtttgagctgcatctgctttgatagtaacagtgtcaccatctttcagttgatcaagggcctttgatgcagtcagcgcattatttgttgtagttatagtattagttgcagcatccattttcgctgctgtcaggtcgctaatggtcgccgctttattggctatcgtaccggaaccattcacgttaaaaccattcagccccagcgtatcagagtcaattttcttcagatcaatagtgatagtctggccgtcgttcgcaccaacctgaattttcatcgaaccgtcttttgccagtacgttcacgccgttgaactgggtctgaccggatacgcggtcaatttcgtcgagacgggatttgatttcgtcctgaatggagtccagatccgaatcagagttagtcccggtagaagcctgaaccgtcagctcacggatacgctgtaagttgttgttgatttcggacagcgcgccttcagtggtctgtgcaacagaaataccgtcgttggcgttacgtgcagcctgagtcaggcctttaatgttagaagtaaaacggttagcaatcgcctgacccgcggcgtcatccttcgcgctgttaatacgcaagccagaagacagacgctcgatagaactcgacagcgcagactggttcttgttgatattattttgagtgatcagcgagaggctgttggtattaatgacttgtgccatgattcgttatcctatattgcaagtcgttgattacgttttgggtttccacccgtcggctcaatcgccgtcaaccctgttatcgtctgtcgtaaaacaacctttagaatttttttcacaaacagccattttttgttagtcgacgaaatactcttttctctgccccttattcccgctattaaaaaaaacaattaaacgtaaactttgcgcaattcaggccgataaccccggtattcgttttacgtgtcgaaagataaaaggaaatcgcatggcaagtatttcatcgctgggagtcgggtcaggtctggatttaagttcaatccttgatagcctcaccgccgcgcaaaaagcgacgctaacccctatttcaaatcagcaatcgtcgtttaccgctaaacttagcgcctacggtacgctgaaaagcgcgctgacgactttccagaccgccaatactgcattgtctaaagccgatcttttttccgctaccagcaccaccagcagcaccaccgcgttcagtgccaccaccgcgggtaatgccatcgccgggaaatacaccatcagcgtcacccatctggcgcaggcgcaaaccctgacaacgcgcaccaccagagacgatacgaaaacggcgatcgccaccagcgacagcaaactcaccattcaacaaggcggcgacaaagatccgatttccattgatatcagcgcggctaactcgtctttaagcgggatccgtgatgccatcaacaacgcaaaagcaggcgtaagcgcaagcatcattaacgtgggtaacggtgaatatcgtctgtcagtcacatcaaatgacaccggccttgataatgcgatgacactctcggtcagcggtgatgatgcgctacaaagttttatgggctatgacgccagtgccagcagcaacggcatggaggtctcggtcgccgcccagaatgcacagctgacggtcaataacgtcgccattgagaacagcagcaacaccatcagcgacgcgctggaaaacatcaccctgaacctgaacgatgtcaccacaggcaaccagacgctgaccatcactcaggacacctccaaagcgcaaacggcgattaaagactgggtgaatgcctataactcgctaatagataccttcagcagcctgaccaaatacaccgccgtagatgcgggagctgatagccagaattctagcaatggcgcactactcggcgactccacgctgcgaacgattcagacgcagttgaaatcgatgctgagtaataccgtcagttcttccaactataaaacgctggcgcagattggtatcacgaccgatcccagcgatggcaaactggaactggatgccgacaaactcaccgctgcattgaaaaaagatgccagcggcgtaggtgcattgattgttggcgatggtaaaaaaaccggcatcacgaccaccatcggcagcaacctgaccagttggctttcgacaacgggcattattaaagccgctaccgatggcgttagtaagaccctgaataagttaactaaagactacaacgccgccagcgatcgcattgatgcgcaggtcgcgcgctataaagaacaatttacccaactggacgttttaatgacctcgttaaacagcaccagcagctacttaacgcagcagttcgaaaacaacagtaattccaagtaatcaatattcatcgggagacaggtcatgtacgcggcaaaaggcacccaggcctatgcacaaattggcgtcgaaagcgccgtaatgagcgccagccaacagcagttggtcaccatgctatttgatggagtgttaagcgcactggttagagcgcgcctgtttatgcaggacaacaatcagcaaggcaaaggtgtctctttgtcaaaagcgatcaacatcattgagaacggactgcgggtgagtcttgatgaagagagcaaagacgaattaacccaaaacttaattgctctttatagctatatggtcaggcgtttgctgcaagccaatttacgcaacgatgtctccgcagtcgaagaggtggaagcattaatgcgtaatattgccgatgcctggaaagagtctttactctccccttctttgattcaggacccagtctgatgaacaatgcaccgcatttgtatttcgcctggcaacaactcgtcgaaaaaagccagctcatgttacgcctggcaacggaagaacaatgggacgaactcatcgccagcgaaatggcgtatgtgaatgcggtgcaggagatcgcacacctgactgaagaggttgccccgtccactacgatgcaggagcagctccgcccgatgctgcacctgattctcgacaacgaaagcaaggtaaagcagttattacagattcggatggatgaactggcgaaactggtcggtcagtcatcggtgcaaaaatcggtgttaagtgcctatggcgatcagggcggctttgtgctggctccgcaggataacctcttttgaatcttaatgagccgatggctcgcgaataatccgattacggctacgcttctaatattccccttgaatggagtcgaagaatgcgtaatcccacgctgttacaatgttttcactggtattacccggaaggcggtaagctctggcctgaactggccgagcgcgcagacggttttaatgatattggtatcaatatggtctggttgccgcccgcctataaaggcgcatcgggcgggtattcggtcggctacgactcctatgatttatttgatttaggtgagtttgatcagaaaggcagcatccctactaaatatggtgataaagcacaactgctggccgccattgacgccctgaaacgtaatgacattgcggtgctgctggacgtggtagtcaaccacaaaatgggcgcggatgaaaaagaagctattcgcgtgcagcgtgtaaatgctgatgaccgtacgcaaattgacgaagaaatcattgagtgtgaaggctggacgcgttacaccttccccgcccgtgccgggcaatactcgcagtttatctgggatttcaaatgttttagcggtatcgaccatatcgaaaatcctgatgaagatggcatatttaaaattgttaacgactacaccggcgaaggctggaacgatcaggttgatgatgaactcggtaatttcgattatctgatgggtgagaatatcgattttcgcaatcatgccgtgacggaagagattaaatactgggcgcgctgggtgatggaacaaacgcaatgcgacggctttcgtcttgatgcggtcaaacatattccggcatggttttataaagagtggatcgaacacgtacaggaagttgcgccaaagccgctgtttattgtagctgaatactggtcgcatgaagtcgataaactgcaaacgtatattgatcaggtggaaggcaaaaccatgctgtttgatgcgccgctgcagatgaaattccatgaagcatcgcgcatgggtcgcgactacgacatgacgcagatcttcactgggacgctggtggaagccgatccttttcacgccgtaaccctcgttgccaaccacgacacccaaccgttgcaagccctcgaagcaccggtcgaaccgtggtttaaaccgctggcgtatgccttaattttgttgcgggaaaatggcgttccttcggtgttctatccggacctctacggtgcacattacgaagatgtcggtggtgacgggcaaacctatccgatagatatgccaataatcgaacagcttgatgagttaattctcgcccgtcagcgtttcgcccacggtgtacagacgttatttttcgaccatccgaactgcattgcctttagccgcagtggcaccgacgaatatcccggctgcgtggtggtcatgtcgaacggagatgatggcgaaaaaaccattcatctgggagagaattacggcaataaaacctggcgtgattttctggggaaccggcaagagagcgtagtgacagacgaaaacggcgaagcgaccttcttttgcaacggcggcagcgttagcgtgtgggttatcgaagaggtgatttaaatccatccccggcggcaagccggggagatttcattacggcagtggcgtcggtaacggcgctttatccagcgcggcggcacactctgccgtcgggcgatccacacgctccatcgtcataccatcgtactcaatggtgttaccgtcacgctcaacctcgtacagctcacgttttacggtaacgttagtgagatcatcagacatcaatgtcaacttacccggcacggcaatcacccgctgccactgacggcaatccagggtatcgccctctttagtgacaatgaggctgcctatcgcttccggactgaccagcgcacgttgcggccctttggtctgccagtaacccgtcagccagtccggcgcgggggttttcacgacattgttatagttttcgacttcggcacagcccgccagcaacatgagcgcacctgcaattgcgagttttttcatcattcgtcctgcatgagaagaaaagaggattgtggcattaaagccctgatgtcgccagcctttccaggctcagagagaaatttgatctaaccattatttttgtgaattattaccccgaaaataaatttgcatggtgtatgattcgcgactcttgtgtcaaaccttctgagttcagaggctacattcatgtcatggcagcaattcaaacacgcctggttgattaaattctgggcacccatccctgcggtcatcgcggcgggtattctctccacttactattttggcatcactggcacattttgggcagtcacgggtgaatttacccgttggggcggtcagctcctgcagttgttcggcgtccatgctgaagagtggggttattttaaaattatccatctggaaggatcgccattaacccgcatcgacggaatgatgatcctcggtatgtttggcggctgttttgccgcagcgctgtgggccaacaatgtcaaactgcgcatgccgcgcagccgtatccgcattatgcaggccatcattggcggtattatcgccggttttggcgcacgtctggcaatgggctgtaacctggcggcgttctttaccggaattccacagttctcgctgcacgcctggttctttgccatcgccactgccattggttcatggtttggcgcgcgctttaccctgctgcccatcttccgtattcccgtgaaaatgcagaaagtttctgccgcctcaccgctgacgcaaaaaccggatcaggcgcggcgtcgttttcgtctcgggatgctggtctttttcggcatgctgggctgggcgctgctcacggcgatgaaccaacccaaactggggctggcaatgctgtttggcgtcggctttggtttactgattgaacgtgcgcaaatctgctttacttcggcgttccgcgatatgtggatcaccggacgtacccatatggcgaaagcaatcattatcggtatggcggtaagtgccatcgggatcttcagttacgtacagttaggcgttgaacccaaaatcatgtgggcgggaccaaacgcggtaattggtggtttactgtttggttttggcatcgtgctggcaggcggctgcgaaaccggctggatgtaccgcgcggtagaaggccaggtgcactactggtgggtcggtctgggcaacgtgatcggctcaacgattctggcgtattactgggatgatttcgctccggcgctggccaccgactgggacaaaatcaacctgctgaaaacctttggtccgatgggtggcctgctggtgacatatttgctgttgtttgcagctctaatgttgattatcggctgggaaaaacgcttcttccgccgtgcggcaccgcagattgctaaggagatcgcatgaaaaatatcgttcctgattaccgtcttgatatggtgggtgaaccctgcccttatccggctgtcgcaacccttgaggcgatgccgcagttaaaaaaaggggagatcctggaagtggtgagcgactgtccgcagtcgatcaataatattccactggatgcgcgtaatcacggctatacggtgctggatattcagcaagacgggccgaccattcgttatttaattcagaagtaatccctcattcccgctgtggcccacagcgggaacatcgttacctctctatcacatagattttacccgccccctctcctattcttttcagtgtgctctcaggaggtttctatgtgtggacgctttgcccaatcccaaacgcgtgaagattacctcgcgtttctcgcggaagatattgaacgcgatattccctacgatcccgaacctattggcagatacaacgtcgcgccgggaaccaaagtccttctgctcagtgaacgtgatgaacaccttcatctggatccggttttctggggatatgctcccggatggtgggataaaccgccgctgattaacgcccgcgtagaaactgccgcaaccagtcgcatgtttaaaccgctctggcaacatggtcgggtaatatgctttgccgatggctggtttgagtggaaaaaagaaggcgacaaaaaacagccttattttatctatcgcgctgatggacaacctgtttttatagccgcgataggtagcacaccgtttgagcgcggtgacgaagccgaaggagttttaattgtcactgcagcagcagaccagggcctggtagatattcatgaccgccgcccgctggtactgtcgccagaaactgcgcgggaatggatgcggcaagacattggtggtaaagaagcctcagaaatcgctaccagaagctgtgtgccagcaaaccagttcatctggcaccctgtgtcgcgcgcggtgggtaatgttaaaaaccagggcgcggagttaattcaacctgtttgataagcctggagattatctacacctggatggacatcattgtactatgccccgtacatgccccatcacatcctcaacatcaaagtattagagccttgcaaaccattatgcgtctcagtttgtctcatctatcttacgcaaaaaaaatagaactaatatcaagcggcgctatattgcgtattaaataaaaccacctcaattacattaataaatctaaacaaatatcatgcaaataatttccatggttatttttaggctatttaaattaaaaaaataaattatgagtcaaacataaataacaacctttaatataatttgactaccaaatttatattcgttcacaaaatagtcatgcattgtgtgcaatagaaacagttcagataaaaatagggatctacttcacaatttaaatgagaaactaaaacttacatcttgaaataatctcattgattagatgaatatttgtagtgcagtgacatcatttttaaataatagttcaaataaaagggctcacgatgaaaaaattaacagtggcaatttctgctgtagctgcatcagtactgatggcgatgtctgctcaggcagcagagatttacaataaagacagtaacaagctggatctgtacggaaaagttaatgctaagcactacttctcttctaacgatgcagatgatggcgacacaacttatgttcgtctgggcttcaaaggcgaaactcaaatcaacgatcaactgactggtttcggtcagtgggaatatgaattcaaaggcaaccgtgctgaatctcaaggttcttccaaagataaaacccgtcttgccttcgctggcctgaaattcggtgactacggctccatcgattatggccgtaactacggtgtagcatacgatatcggtgcatggaccgacgttctgccagaattcggtggcgatacctggacccaaacagatgtgttcatgactggtcgcaccacaggtgttgcaacctatcgtaacaacgacttctttggtctggttgatggtctgaactttgctgctcagtatcagggtaaaaatgaccgcactgacgtaactgaagctaacggtgatggtttcggtttctccactacttatgagtatgaaggattcggtgtaggtgcaacctatgctaaatctgaccgcactaatgatcaggttatctacggtaacaacagcctgaatgcatctggtcaaaatgctgaagtatgggcagctggtctgaaatatgatgcgaacaacatctatctggctaccacctattctgaaacccagaacatgactgtttttggtaataaccatattgccaacaaagcacaaaacttcgaagtagttgcacaatatcagttcgacttcggtctgcgtccgtccgttgcttacctgcaatctaaaggaaaagacttgggtgcgtggggtgatcaggacctggttgaatatattgatgtaggtgcaacctattacttcaacaaaaatatgtccacttttgttgattacaaaatcaacctgattgataagagcgatttcacgaaagcatctggcgttgctaccgatgatatcgttgctgtaggattggtttaccagttctaatctgattactcaaagatatgttgtgggaggctttgcctccccaacatataagtggccccctcaagccactttccttagaagcactatcttgcttctgactatataaaccttctgttatatattaccctttattttctggggcgtttcaacgccccatttttaataatactcagtgaacaattaacgtatcaattagatttaataacaacgatatccgtacctaaccggatatctaatgtcataagcatccctttaattatcccctcaacctcttgtaactttcccactcttgaactccacatagtccaaacgccggatgcaaaaaaatcacacgtgcatttctgaaattgtgatgaaggaagatagtatcaattatatgtgcttataaacgaccccgattagcgcagaagtcaccggattgttcaggctccaataggttgagtatgccgtatttattttccaaaataaaaatcgatgctgttgctccttcataaaatacttttactctctggacgcttttcttagctctcttggtgttatcttaaaacgattatggaacctttcagtaaaacgagaaggacacttgtaaccattttccctggcaatctcgctgatgggttttactgtcgtttgtatagcagacaacgcattatttaacctcacgtcgtccaatatactttgaaaacttattccctcgcttgccagacggcgatgcaatgtggaaacagaaatgtagagatatctcgctaccttgtttgctgtccattttgttccaggttcggatagcattaggttataacaacgacttattaatgattgtttactatctgataaaagtaaacaattaacatgatgtgctcctaatgaaagtagaacgcccattgctaagtgttcctgaatttgcgttgagaagcctcggaaaatagatgtttttagttgctcccaacaatatattaactcggggttctgaggtaagcagaaacctgtcgtgttacgaatttgatcagttatcgcataaaatttttgaaacttttcaattagatcaatgggataataaagcatttctgcaagataaagacctgcttctggataattcgcaatataaaattcatatccacagggaaataatattatctgattattatcaacagttagactatgcgtctcccaattgataactttttttccctgacggatacgacataaagctggcataagaggcttaaccctgtgaatctcatgatgtttatgcatccgtatttcttcaatctttaggttagacttatcttttgccagcatactcttaccctactttatctcataaactggtgttatctcagcggttgcaattttattggcattaagcatataaccaactaacgctccgctggaattagaatccacaggaatcttatcagtttttagagcccatactttaaactggtaatgatggggtttatctcctttgggaggacatgctccaccaaatcctgcataaccaaaatcatttcggccttgaacagcaccagtcggaagttttgtaccatcacgtcttcctgcatcagtgggcaaatatgttacagttgctggaatattagcaacagtccagtgccaccatccactgcctgtaggagcatctggatcatacacagttacggcaaagcttttggtgccttcaggagcaccagaccaggttaatgagggcgatgtattacccccttcacacccaaatccagaaaatacatgagacgttgtaagttgctctcctgtttttatttcattactagtgacctgaaatgctgcggcctgcgcagaaaatgttatgaatgccaatacacttgaaacgataagttttttcataaaaacctcattgttgtgacctatcgttattttatttgatgtgccttgatctcattatgcataaaggcgcaatgatcgcgcaaatgcaatcataattataaaggtgccccgaacattagccataatatgcacaaatcagattcctgttatctcaaggataattattttttaatgcggtgcacttcgtgacaacaagttaatgactaacacaccggcacaaatcaacatcatgcctatgatagctggcaggtccagtcgttgaccaaaaaatccccaggaaagcaaactaatcagaacgataccgactcctgaccagatagcataagcaatccctgtaggtatataagccagcgtctgagctaataaccagaatgatgcacaatagcaaataattgtgccaacagagggccataaccgtgtaaacccctctgaaaacttcattaaggttgtaccaatgacctctgcaagtattgcgccaccaagataaatataagggttcatagcatattctttcctgttcatactggagagaattgtactacagtttgaacacaactcaccgttttcatcctggtgtatgtgtatccagggggctctggcgtggcaagagataaaggcaggaacaataatgatcagaaggaaccccaggctaacgaatgagttcactcttcctgggagcaaagcgaagacaaaacatgttatcgcgtttacggatcgtggatggcagaaaacaaccaggatcaggtatccattttaaaccagaaattgagtgagtttgccccatccatgccccacgctgtgggatcggatataattaaacaagcatagtcaacaggttacacaacctacacctgcatggacatcacttcctgatacgccgccaccagcttattacgcacctgaatccccatttgcatagaaactgaggctttttgcatatcggtcatcacatcgtttagcgccacgccgggttcaccgagggtgaatttttctgcctgcgtgcgggcgactgtttgtgtatcgcttatgcgatcgagcgcggcgtgcagctgcccggcaaaactaatggtcggttgcggcagtgattcctgcgcacgcgcactcatcgccgtagcctgtaactggctgataaccccttcaatcccctgtatcgctgacattttcgtctcccggataatttctggtaacaaagcctaccagtaagtcaataagacaaaggcgctaaatagcaacaaaaaaacgggtttattggcggatagaaaaaaacgaaagcacaaataatgggagcgtcaatttttcgagtttgctgacccgggagtgagtcttgttccactttgccaataacgccgtccataatcagccacgaggtgcgcgatgaatgcgactgcagcccagacaaaatctcttgagtggcttaatcgcctgcgtgcgaatccgaaaattccattgattgttgccggttccgcagcagtggcggtcatggtcgcactgatcctgtgggcgaaagcccccgactaccgcacattattcagcaatctttccgatcaggatggtggcgcaattgtcagccaactgacgcaaatgaatattccttaccgcttcagcgaagccagcggcgctattgaagttccggcagataaagttcacgaactgcgcctgcgcctggcgcaacaaggtttgccaaaaggcggcgcggtcggtttcgaactgctcgatcaggaaaagtttggtatcagccagttcagcgaacaggtgaattatcagcgggcgctggaaggcgagctttctcgtaccatcgaaactatcggcccggtaaaaggggcgcgcgtacatctggcaatgccgaaaccgtctttattcgtccgtgaacaaaaatccccttctgcatcggtgacggtaaatctgttacccggccgcgcactcgatgaagggcaaattagcgccattgtacatctggtttccagcgcggtggctggtctgccgccgggaaacgtcacgctggtggatcagggcggacatctgttaacccagtccaacaccagcgggcgcgatcttaatgacgctcagttgaaatatgccagcgatgtcgaaggccgtattcagcggcgtattgaagcgatcctgtcgcctattgttggtaacggtaatattcacgcccaggtcacggcgcaactggacttcgccagtaaagaacaaacggaagaacagtatcgccctaacggtgatgaatctcacgcggcgcttcgttcacgccagcttaatgagagcgagcaaagcggttccggttatccgggcggcgtaccgggggcgttgtcgaatcaaccggcacctgcgaataacgcgccaatcagcacgcctccggcaaatcaaaataaccgccagcagcaggcgagcaccaccagcaatagtgggccgcgtagcacacagcggaatgaaaccagtaactacgaagtcgatcgcaccattcgtcataccaaaatgaacgtgggcgatgtgcaacgtctgtcagtcgcggtagtggtgaattacaaaaccttgccagacggtaaaccattgcctctcagcaacgaacagatgaagcaaattgaagctctgacccgcgaggcgatgggcttttctgaaaaacgcggtgattcgctcaatgttgttaactcgccgttcaatagcagtgacgaaagcggcggagcactgccgttctggcaacagcaagcgtttatcgatcagttgctggctgctggctgccggttgctggtactgctggtggcgtggttgctgtggcggaaagcggtacgcccgcagctaacacgtcgcgccgaggcggtgaagactgtgcagcaacaggcacaggcccgcgaggaagtggaagatgcggtggaagtccgtctgagcaaagacgaacaactccaacaacggcgcgctaaccaacgactgggggcagaagtcatgagccagcgtatccgtgaaatgtctgataacgatccgcgcgtggtggcgctggtcattcgccagtggataaataacgatcatgagtaacctgacaggcaccgataaaagcgtcatcctgctgatgaccattggcgaagaccgggcggcagaggtgttcaagcacctctcccagcgcgaagtgcaaaccctgagcgctgcaatggcgaacgtcacgcagatctccaacaagcagctaaccgatgtgctggcggagtttgagcaagaagctgaacagtttgccgcactgaatatcaacgccaacgattatctgcgttcggtattggtcaaagctctgggtgaagaacgtgccgccagcctgctggaagatattctcgaaacccgcgataccgccagcggtattgaaacgctcaactttatggagccgcagagcgccgccgatctgattcgcgatgagcatccgcaaattatcgccaccattctggtgcatctgaagcgcgcccaggccgccgatattctggcgttgttcgatgaacgtctgcgccacgacgtgatgttgcgtatcgccacctttggcggcgtgcagccagccgcgctggcggaactgaccgaagtactgaatggcttgctcgacggtcagaatctcaagcgcagcaaaatgggcggcgtgagaacggcagccgaaattatcaacctgatgaaaacgcagcaggaagaagccgttattaccgccgtgcgtgaattcgacggcgagctggcgcagaaaatcatcgacgagatgttcctgttcgagaatctggtggatgtcgatgatcgcagcattcagcgtctgttgcaggaagtggattccgaatcgctgttgatcgcgctgaaaggggccgagcagccactgcgcgagaaattcctgcgcaatatgtcgcagcgtgccgccgatattctgcgcgacgatctcgccaaccgtggtccggtgcgtctgtcgcaggtcgaaaacgaacagaaagcgattctgctgattgtgcgccgtcttgccgaaactggcgagatggtgattggcagcggcgaggatacctatgtctgataatctgccgtggaaaacctggacgccagacgatctcgcgccaccaccggcagagtttgtgccaatggccgagtcggaagaaaccattattgaagaggtcgaacccagccttgagcagcaactggcgcaactgcaaatgcaggcccacgagcagggttatcaggcggggattgccgaaggtcgccagcaaggtcacgaacagggctatcaggaaggactggcccaggggctggagcaaggtctggcagaggcgaaggctcaacaagcgccaattcatgcccggatgcagcaactggtcagcgaatttcaaactacccttgatgcgcttgatagtgtgatagcttcgcgcctgatgcagatggcgctggaggcagcacgtcaggtcataggtcagacgccaacggtggataactcggcactgatcaaacagatccaacagttgttgcagcaagaaccgttattcagcgggaaaccacagctgcgcgtacacccggatgatctgcaacgtgtggatgatatgctcggcgcaactttaagtttgcatggctggcgcttgcggggcgatcccaccctccatcctggcggctgtaaagtctccgccgatgaaggcgatctcgacgccagtgtcgccacccgctggcaagaactctgccgtctggcagcaccaggagtggtgtaatgaccacgcgcctgactcgctggctaaccacgctggataactttgaagccaaaatggcgcagttgcctgcggtacgtcgctacgggcgattaacccgcgctaccgggctggtgctggaagccaccggattacaattgccgctcggcgcaacctgtgtcattgagcgccagaacggcagcgaaacgcacgaagtagaaagcgaagtcgttggctttaacggtcaacggctgtttttaatgccgctggaggaagtggaaggtgtcctgcccggcgcgcgtgtatatgccaaaaacatttcggcagaagggctgcaaagcggcaagcagttgccgctcggtccggcgttattaggtcgtgttctggacggtagcggtaaaccgctcgatggcctgcccttccccgatacgacggaaaccggtgcgctgattaccccgccatttaacccgttgcaacgtacaccgattgaacatgtgctggacaccggcgtgcgcccaatcaatgccctgcttaccgtcggacgcgggcagcgtatggggctgtttgccgggtccggcgttgggaaaagtgtgctgctggggatgatggcccgttacacccgcgccgatgtcattgtcgtgggtttgattggtgaacgagggcgcgaagtaaaagattttattgagaatatcctcggtgccgaaggacgtgcacgctccgtggtgattgccgctccggcggatgtttctccgctcctgcgaatgcagggtgccgcctatgccacgcgcattgccgaagattttcgcgatcgtggtcagcatgtgttgctgattatggactccctcacccgctacgcgatggcccagcgtgaaattgcgctggcgattggcgaaccacctgccactaaaggttatccaccgtcggtgtttgccaaattaccggcactggtcgagcgtgccggaaatggcattagcggcggcggctcgattaccgcgttttataccgtgctcaccgaaggcgatgaccagcaggaccccattgctgactccgcgcgggcaatcctcgacggtcacattgtgctgtctcgccgactggcggaagccgggcactatccggctatcgatattgaagcgtcgatcagtcgcgcaatgacggcgttgatcagtgagcaacattacgcgcgagtgcgcaccttcaaacagctgttgtcgagttttcagcgtaaccgcgatctggttagcgtcggcgcgtatgccaaaggcagcgatccgatgctcgacaaagccatcgccctgtggccgcagctggagggctatttgcaacaaggcatttttgaacgcgcggactgggaagcgtctctccaggggctggagcgtattttcccgacagtgtcataacccaggagataacggcagatggcggaacatggtgcgctggcgaccctgaaagatctggcagaaaaagaggtagaggatgccgctcgcctgctgggtgaaatgcgtcgcggatgtcagcaggcggaagaacagctcaaaatgctgatcgattatcagaatgaatatcgcaataacctcaatagcgatatgagtgccgggatgaccagcaaccgctggatcaactatcagcagtttatccagacgctggaaaaagccattactcagcatcgccagcaacttaatcagtggacgcagaaagttgacattgccctgaacagctggcgagaaaagaaacaacgtttgcaggcctggcagacactgcaggaacggcaatccacggcggcactgcttgcagaaaaccgcctcgatcagaaaaagatggatgagttcgcccagcgcgccgccatgaggaaacctgaatgattcgcttagcgcccttgattaccgccgacgttgacaccaccacattgcctggcggcaaagccagcgatgctgcacaagattttctcgcgttgttgagcgaagcattagcaggcgagacaacaaccgacaaagcggccccccagttgctggtggcaacagataagcccacggcaaaaggcgagccgctggtcagcgatattctttcagacgcgcaacaagcagatttactgatccctgtggatgaaacaccgcctgtcatcaacgacgaacaatccacattaacaccgttaaccaccgctcagacgatgacgttggctgcggtggctgacaaaaatacgacaaaagacgaaaaagcggatgaccttaatgaagacgtcaccgcaagtctgagcgccctttttgcgatgttgccgggttttgacaatacgcccaaagtgactgatgcaccgtcaaccgtgttaccggcagagaaaccaacgctcttcacaaaactgacttctgcgcaactcactacagcacagcctgatgacgcccccggcacaccagctcagccattaacaccgctggtagcagaagcccagagtaaagcggaagtcatcagcacgccttcgccggtgaccgctgacgccagcccgctaatcactccacaccagacacagccactgcccaccgtcgccgcgcctgttttgagtgcaccgctgggttctcacgaatggcaacaatcattaagccagcatatttcgctgttcacccgccaggggcaacaaagtgcagagttgcgtctgcacccacaggatttaggtgaagtgcaaatttccctcaaagtggatgataaccaggcgcagatccagatgatttcaccgcatcagcacgtacgcgccgccctggaagcagcgctgccggtactgcgtacgcagctggccgaaagtggcattcagttagggcaaagcaacatcagtggcgaaagctttagtggtcagcagcaggccgcttcccagcaacagcaaagccaacgcacagcaaaccatgaacctctggcgggggaagacgacgatacgcttccggttcccgtctctttacaagggcgtgtaacaggtaacagcggcgttgatattttcgcctaacgtcagaggtagcaccgtaatccgcgtcttttccccgctttgttgcgctcaagacgcaggataattagccgataagcagtagcgacacaggaagaccgcaacacatgactgattacgcgataagcaagaaaagcaagcgatcgctttggatcccgattctggtattcattaccctcgcggcctgtgccagcgcaggttacagctactggcattcgcatcaggttgccgctgacgacaaagcgcagcaacgcgtcgtgccctccccggtcttctatgctctggatacctttacggtcaatttgggcgatgcggatcgcgtgctttatatcggcataaccctgcgactgaaagatgaagcaacccgctcgcggctgagtgagtatttgccggaagtccgtagtcgcttgctgttactgttttcgcgtcaggatgctgccgtactggcgacagaagaaggcaagaaaaacctgattgccgagattaaaaccacactttccaccccgcttgttgccgggcaaccgaaacaggatgtcaccgacgtgctgtataccgcttttattctgcgataacgacatgggcgatagtattctttctcaagctgaaattgatgcgctgttgaatggcgacagcgaagtcaaagacgaaccgacagccagtgttagcggcgaaagtgacattcgtccgtacgatccgaatacccaacgacgggttgtgcgcgaacgtttgcaggcgctggaaatcattaatgagcgctttgcccgccattttcgtatggggctgttcaacctgctgcgccgtagcccggacattaccgtcggggccatccgcattcagccgtaccatgaatttgcccgcaacctgccggtgccgaccaatctgaaccttatccacctgaaaccgctgcgcggcacagggctggtggtgttctcgccgagcctggtgtttatcgccgtggataacctgtttggcggcgatggacgcttcccgaccaaagtggaaggtcgcgagtttacccataccgaacagcgcgtcatcaaccgcatgttgaaactggcgcttgaaggctatagcgacgcatggaaggcgattaatccgctggaagttgagtacgtgcgttcggaaatgcaggtgaaatttaccaatatcaccacctcgccgaacgacattgtggttaacacgccgttccatgtggagattggcaacctgaccggcgaatttaatatctgcctgccattcagcatgatcgagccgctacgggaattgttggttaacccgccgctggaaaactcgcgtaatgaagatcagaactggcgcgataacctggtgcgccaggtgcagcattcacagctggaactggtggccaactttgccgatatctcgctacgcctgtcgcagattttaaaactgaaacccggcgacgtcctgccgatagaaaaacccgatcgcatcatcgcccatgttgacggcgtcccggttctgaccagtcagtacggcactctcaacggtcagtatgcgttacggatagaacatttgattaacccgattttaaattctctgaacgaggaacagcccaaatgagtgacatgaataatccggccgatgacaacaacggcgcaatggacgatctgtgggctgaagcgttgagcgagcaaaaatcaaccagcggaaaaagcgctaccgatgcggtgttccagcaatttggcggtggtgatgtcagcggaacgttgcaggatatcgacctgattatggatattccggtcaagctgaccgtcgagctgggccgtacgcggatgaccatcaaagagctgttgcgtctgacgcaagggtccgtcgtggcgctggacggtctggcgggcgaaccgctggatattctgatcaacggttatttaatcgcccagggcgaagtggtggttgttgccgataaatatggcgtgcggatcaccgatatcattaccccgtccgagcggatgcgccgcctgagccgttagtgatgaataaccatgctactgtgcaatcttccgcgccggtttctgctgagccactgctgcaggtgagcggcgcactcatcgccattattgccctgatcctcgctgctgcctggctggtaaaacggctgggatttgcccctaaacgcactggcgttaacggtctgaaaattagcgccagtgcttcgctgggcgcgcgtgaacgggtcgtggtggtcgatgtggaagatgcacggctggtgctcggcgttaccgcagggcaaatcaatctgctgcataaacttcccccttcagcaccaacggaagagataccgcagaccgattttcagtcggtcatgaaaaatttgcttaagcgtggcgggagatcctgatgcgtcgtttgttttctgtcgcaccggtccttctctggctgattacgcccctcgccttcgcgcaactgccgggtatcaccagccagccgctacctggcggtggacaaagctggtcgctcccggtgcagacgctggtgttcatcacctcgttgacgttcattccagcgattttactgatgatgaccagtttcacccgcatcattattgtttttggtttattgcgtaacgcgctgggaacgccctccgcgccacctaaccaggtattgctggggctggcactgtttttgaccttttttattatgtcgccagtgatcgacaaaatttatgtcgatgcgtaccagccattcagcgaagagaaaatctcaatgcaggaggcgctggaaaaaggggcgcagccgctgcgtgagtttatgctgcgtcagacccgcgaggcagatttagggttgtttgccagactggcgaataccggcccgttgcaggggcctgaagctgtgccgatgcgcattttgctcccggcctacgtgaccagcgagttgaaaaccgcatttcagataggcttcacgattttcatcccttttttgattatcgacctggtgattgccagcgtgttgatggcattggggatgatgatggttccccccgccaccattgctctgccctttaaactgatgctgtttgtactggtggatggctggcaattgctggtcggttcgctggcgcagagcttttacagctagagaggcaaaatgacacctgaatcggtcatgatgatgggaactgaagcgatgaaagtcgcgctggcactggcagccccgctgttgctggtggcgctggtcacgggccttatcatcagtattttgcaggcagccacgcagattaacgaaatgacgctgtcgtttattccgaaaatcatcgccgtatttatcgccattattattgccggaccgtggatgctcaatctgttgctggattacgtccgcaccttgttcactaacctgccgtatatcatcgggtagcccgtacaatgatgcaggtgacaagcgatcaatggctttcctggttaagcctgtacttctggccgttactgcgcgtgctggcgctcatttctaccgcgccaattctgagcgaacgcagcgtgccgaaacgggtaaaactgggtctggcaatgatgatcacattcgccattgccccatcattacctgccaacgatgttcctgttttttcgttctttgctctgtggctggccgtgcagcagatcctgatcggcattgcgcttggttttaccatgcaatttgcctttgccgctgtgcgaaccgctggcgaaattatcggtctgcaaatggggctgtcatttgcgacatttgtcgatcctggcagccatctcaatatgcccgttttagcgcgcatcatggatatgctggcattactgctgttcctgacatttaacggtcatttatggttgatttcactgctggtcgatacctttcacaccctgccgattggtagcgaaccgttgaacagcaatgcgtttctggcactcaccaaagcagggagtttgattttccttaacgggctgatgctggcgttaccgctcattactctgttgctgaccctgaatctggcattaggtttactgaatcgtatggccccacaattatccatttttgttattggatttccattaactctgactgtcggcatctctttaatggcggcattaatgccgttaattgcgcctttttgcgaacatttattcagtgaaatttttaatttgctggctgatattacatctcatctaatgcgccacggttatataaacgcgttaaggtgtcgtgccacgcctgccactgcaacgagctttgcagaacatacatgttgctgaccatccggcgaatcacataccaggagaggagtaacatgctggtaaagagcgcccacagcagggttaatgcaatgctgatactgccgaaatcgccgcgcacgccttcgcttagcgtatggacgcgcaccagcacaccgtcgaaatggtccagacgttcccagctaacatagcgactgtccatacgaatgccgccccgcgtgtcatgttccattgcctgcgccagcaaggccagttcacgaggatcaaaaatattccctgttggatggtcaggatttgaagaggtcaaaaatctcagcttactgtcatagagctgatactcaccatcgaggtttttatcgatggcgtttcttaaaaattgctgcatagtacgcacgggaatactcatccccagcacgccataccagtagttattactgtctaccggaacactgacggtaacctgcggttcagtattgctggcgtgttccggttgcgaagtgaaccagcgtaccgcgcggtgacgattttctcgttgtgaatggccgataaaccagggttgggtgacatagccgtaataacgcgttggtacattgcgcgtaaacaaggtcggcagcgtcgaaacgtaaaatccagcacgcgagacatacacagcctgttcaaccatcgacgaggagttgtgcgccagtcgcagcaagtaaccaacttccagtgcagcggtaatttcattgtcgaggctttcattttcgcgagacaggagattcccctcgctgactaatgcatccgatacgccattgactggcagggtgcgccgtcggttgagttcgatttgccaggcgtgctcgtcgcgatgctgttcgaactcggttacggcattacgcagagaggtgaaatccagtggcgccacgagagcttcgcgcatgccattacgcaaaaagatcagtttgtcgacgttatactgcaaatgcttatcgagcgcgttggctacgttttccagatgattacgctggctggatatataggcatcttccagcaccaccacttcacgccaggtgagcaaggtggaaaaaagcaataccacgataaagcagagattaacgatatgaccaggccccaggcggcgtgcgagttttttcaaccagctctggttttccatttttgtctcgtgctgcaccctgacgactcccaacctgcttttttatgattctggcataacccggcgatagcgtaccgcaaaacagcgataattttataatggtggcatgataagacgcgactatcattcattgcaggcattgggacaccaggccggatgtgatccggcctggtgttaatgataccctttcaaacttcttccgcagaacgactcccctcccccggaacaagatcggtttcatgaaaagcttcccgcttgaccccgtaaccgtcataccaacgacactcaaccataccgctggagtatccagtgacaatcatccgcgggccgccctctttaaccgtaacttcctcactaaccataaagctcatactcgcctccttttttcgagtgaaacttgttcaccttagttgaagatggcgaattttgcataatagccagtgcgagtattaatgtgcctgaccgcgcattttcgctactgctttcactcccagcaccacgatgccgccgatgataaatccaagaatcagatttaaaacagtcggtaatatcatcgccaccactgcactttgctgcccggcgatatgttcaatagcgtgatgcagcggcgcaataccatgtaccacaatcccgccgccgacgaggaacatcgccagcgtgccgacaatcgataatgctttcatcagccagggcgcgataatcaataaccctttacctaatgcctgcatcagcgcgctggatttttccgccagccaataccccaggtcatcaatcttaacgataacccctaccagaccgtagacgcccacggtcactaccagcgcgatgcctgaaagcaccagcacctgattaagcaacggcgcctctgccacaatccccagcgtgatggcgacgatttccgcagacaaaataaaatcggtacgaatcgcccctttaattttgtccttttcaaacttcagcggatcctgcgccgccagcttctccagacgctgctgactctgcgccggatcttctttatgtttacgcgcctccagcatatgcagcactttctctaccccttcaaagcagagaaacgcgccaccaatcatcaacagtggcgtaatcgcccacgggataaacgcactgatgatcagcgccagcggcaccagaatcactttattgatcagcgatcctttcgccacgccccagaccacgggaagttcccggttggcccgcacgcctgaaacttgttgcgcattgagcgatagatcatcccctaatacaccggcggttttcttcgccgccagtttgcccatcacggagatatcgtccagcagtgtggcgatatcatcgagcaacgtcagtaaactactcccggccaaaagcattccctctcatttttattgttgaagggtgtaagtatgaagcaaaaacggcagctctgatacttgcttcacaggtcaacatttttttaacaatcaagtgcaattatatctctcgccagcagaatgattttcacgtttactatgaaccacctttttatttccaccgtgagggattatgcgtttccgccagttgttaccgctttttggcgcgctgtttgcgttgtatatcatttggggctcaacctattttgtcattcggattggcgtggaaagctggcctccgttaatgatggcgggcgttcgattcctggcagccggtattttattgctggcatttttgctactgcgcggacacaaacttcccccgctacgtccgctgctcaatgccgcgctgattggcctgttattgctggctgtcggtaatggcatggtgacggttgccgaacatcaaaatgttccttccggcatcgccgccgttgtggttgcaaccgtgcccctctttaccctgtgcttcagccgcctgtttggcattaaaacgcgcaaactggaatgggtgggtatcgccattgggcttgccggaatcatcatgctcaatagcggtggaaatttaagcggcaatccgtggggcgcgattctgattttaatcggctcgattagctgggcgtttggctcggtttatggctcgcgcattaccttacctgtagggatgatggcgggtgcgattgagatgctggcggctggcgtggtgttaatgatcgcgtcgatgattgcgggtgaaaaactgacggcgctcccttccctttcaggcttccttgcggtcggctatctggcgctgtttggttcgattatcgccattaacgcttatatgtatttaatccgcaacgtcagtccggctctcgccaccagctacgcctacgttaacccagtggtcgcggtcttgctgggtacgggactgggcggcgaaacgctgtcgaagattgaatggctggcgctcggcgtaattgttttcgcggtggtactggtcacgttgggaaaatatctcttcccggccaaacccgttgtcgcgccagttattcaggatgcatcaagcgagtaaatgaatcccctgcgtgtcgatctgcgcgctggcaccttcgccgcagatccactcttccagacgctcggtaagcgcttcatccgtcagcttctcgcgcccacgtaacgcacactcccagacaatcagtacgcgccagccgagtgcctgcaagcgattgatatcgcggcgatcgcgctcaacatttttacctatcttctccagccagaactcggttcgggtcgcaggcactttaaacagatagcagtgatgatgatgccagaagcagccgtgggtaaatatcacgcagcgatattcatcaacgacaaaatccgggcgtccgggcagactggcgtcctgaacgcgaaacgcaaggccctgcccggttaacaaactggcgaggcgcttctcaatcgccgtatcacgcgtggcaatcgcgcgcatatttttgctgcgggtggccttatcgtgaacgtcgaccatgttgtgcctcttgctgacgcaacgccaccgcctgtttgatttttggctcaagcagttttgccaccgcggcaaagaccggcacgaccaccgagttaccgaactggcgataggcctgagtgtccgaaaccggaatgcggaatttcgcttctcccggcgcttcaaaacccattaagcgcgcgcattcacgaggtgttaaccgacgtggacgatgttgctgattcagcggatcgtcaaagtctttctcacccgtggccatatcccagccgcggtcgattaaaatttccgcgccatctttgtaataacgagcagacagcgtacgggtgacactttgcggattgttcggataaaccattccataaccgaagccgttaccgcgcgcctgatgttttttcgcatatcgatagaggtacttccacagcaccggcgtcaggatatattttgcctcaaccatcgggtccagcagctgcgccagcgtcactcgctgtgcagggaaacattcgctgatatcacgcagagtaaaatcggctttcagattcagatcgcgacgaaaacccaccagcacgatgcgttcacggtgctgcggcaggaaatgtttaccgtcgatgattttcggatcgtccggcccgttatcttctgcgtcggcaacgtcatagcccagttcgtccagcgtctgcatgatgatgcggaacgtttttcccttatcgtgacttttcaggtttttgacgttttcgagcacaaacatcgccggacgacgcgcgtcgataatgcgcaccacatcaaagaacagcgtgccctgggtatcgcaggcaaaaccgtgcgcccgcccgagcgagttctttttcgatacgccagccagcgaaaatggctgacaagggaaaccggccagtaaaacatcgtgttcaggaatgtgttgacgaatatgttccgccgccgcctcatcactcacgccttcttgatgactgagggtgatgtcgcggatatcttcattaaaatgatgcgtcgccgggtcgcaataatggttggctttataagtgcgtaccgcatgtttgttccattcgctggtaaacacgcactgtccaccaatcgattcaaaaccacgacggatgccgccaattccggcaaatagatcgataaagcgaaacgcataatgcggatgatgttccggtggtttgggtaacaacgtttgcagatgggcaaactctttctcacttaaacggtgccatgcagagtcattcgccagcgcacgttttaaaattgccgcgctccagtgattctcacccacaccattaagctgcgccaccagcgttttaacatcataaatttgcagcagtttctccagcattgcctgtgcggcattcccggtgctgtatgaatcggttactgatatattttcctgcatagatttaaccggccatctgagatggccgacaggttaacataattactgccgtttagggccacgcgctcagccagcgggtgaaaacgcatctatcaccttgtgatcgataccttaattctcccccgccagttcggcaccgagcttcgccataaactcgactaaaaattgcgcgttgtgctgtgccagctgcttgcctcttgcggtttgcatggtttgcggtaatttcagtaactttgtctggaaatgatccagcgcgtagcgtttatcatcaagcgggcgatgctgtgcgaacggatcttcgccatcaaacagcgccaagcccaatgcccctgaaacggcaaataagcgcgccaggccaatcgcccccagggcttccagccgatccgcatcctggacgattttagcttccgttgttaagggggcgatttgcgcgctgaaactgtgagcggcaatggcatgacaaacggcctcaattttctccgccggaaattgcacgaactcttcacggagcaggcgacgcgtctcttctgccgccaggattgaagaacgctgccgttgcggatgatttttcgccaagctcacgatatcgtgaaaataacaggcggttaaaatcaccagcatatcgacatcgtcatctgccgccagtttctgtgccgtagcccagacacggcgaaaatgacacaggtcatgcgccgcgtcctgatgttgatgatggtttttcaaccagttctcgaactgtgcctgccagtgttgtaactccatacgcgctccgttgccaaagagtcgcaaccttagcagtttttattcatagcgtctgcaacgtgcgggacgaggtcgggtgtaccatgcaatgccgcctaacaaggcaccaaccagggccataaacagaaatccgaccaatgctcctaaccacttccccgcggtagatcctaaatcactttcaaatcccgacacgggggcatcggggatccggctcatcacccagatgtatcgcgccattgcccagacgaaatagccacaccatgtatagaaagcccacaaagccaatttgccgccagggctgcgagagagtctctcttccatctttgtcgaaccgtattccattttgagataacccggaaaattcagacttagaactattatgtgataaaaatcacatttttccacattggatgagccagtcaagactcaatcattttttgaacaaatagataaattttgcgcaacggcggtgaatacaggaaaattcgatttgaacgattttatttatctttgatttcggctttattaattcattcaatcaatatattggtactgattacaattatacctttttatttttctgtgtcatcatgcctccgttattagccttttatcgtcttgtttatattttttttggccggcatgatgccggctttttttatgccttcattaatgtgcgcgagatcacgccagccgtttagcgcaacaatcattgatactccctatcttttcaatcaactcataacatattgatatacatccataatattcatgaatatttatattcagaattcataactatgaattatattaaatagattagaaacattttgaaatcttttaaatacatttgttacatgtaatctttaaaataaaatgaacttcatagaatagtatccaaatgtgctttttttggataacagcacttattgatatattcatgaagattataatcacaagggaatacataatgaaaagaaaagttctggcaatgctggtcccggcgttattagttgctggcgcagcaaatgcggctgaaatttataataaaaatggcaataaagttgagctatacggcaagatggttggtgagcgcattctgaccgaccgtgaaaatggtgaaaaaggcgataattctcaagatacctcttatgcccgtgtaggcgtgaaaggtgaaactcagatcaaccctgaactgactggttacggtcagtttgaactagacctggaagcatcaaacagacacaaccctgaccaaactcgtttggcatatgctggtttgagttacaaagattttggttcattcgactacggtcgtaatgtcggtgtcgcgtatgatgcagaagcatttactgatatgtttgttgagtggggcggtgactcatgggctggtactgacctgttcatgaccaaccgtaccaacggtgttgcaacctatcgtaacacagatttctttggcatggttgaaggtctaaattttgctctgcaatatcagggtaaaaatgaaggtacaggcaactacaaagcaaatggcgatggccatggtttatctgcaacttacactattgacggtttctcatttgctggtgcttatgcaaactctgaccgtactgattggcagtctggtgatggtaaaggcgaaagagccgaagtttgggcgttgtcaacaaaatatgacgctaacaatgtctatgctgctgtgatgtacggtgaatctcacaacatgaattccgacgacggtgatgttgtgaacaaaacacaaaacttcgaagctgttctgcaatatcagttcgactttggtctgcgtccatccatcggttactcctattctaaagcactggacgtagcaggttacaaagattctgatcgtctgaactatattgaaatcggtacctggtattacttcaataagaatatgaacgtatataccgcttatcagatcaacctgcttgataagagtgattatgttctcgctcatggactgaacaccgacgaccaactggcagttggtatcgtctaccagttctaatcagccaacgcgccgaggcgtgttactgtaaaacataacaccagcctgagttcgtccctcatcgaactcaggctttttttattggcatttcatctccatctgcggcacacgcaattgccaaagcatctcgatacagccccttaccctgcccctcctggcacaatatcctctaccagcaactcttccagccaacaccccaaatgcatttctttataaatttaatctgtaacaaaaccgcttcccatatagaaatatttgcaaaaatagtgcatgaaaaaagctttttccctaccaatccgggatataaatattcatcagtaccacaacattccacagcactaaatctctccccatcgcccccaaacctctgataatggtctaaaatcattgagaccacttgcgacgacgttactcaataaggaaagtttggcgtgaataatattcaacaccagtgcagcatcatcattacatacttatgcccgccaactaccgctttcgatatattgactcaatttttcagcctggttaaaaatagcgaccagctcagtcgcaaatatagtgactaccctaactaagcaacaataaggaatacactatgactgttcaaacaagtaaaaacccgcaggtcgatattgctgaagataatgcgttcttcccttcagaatattcgcttagccaatatacgagtcccgtctctgatcttgatggcgtggactatccaaaaccgtatcgcggtaaacataaaattctggtgatcgccgcggacgaacgttatttgccgaccgataacggaaaactgttctcgaccggtaaccatccgattgaaacgttgctgccgttgtatcatctccatgctgcaggtttcgaattcgaagtggcgaccatttccggtctgatgaccaagtttgaatactgggctatgccgcacaaagatgaaaaagtaatgccattctttgaacagcataaatcgttattccgtaatccgaagaaactcgcggatgttgtcgccagcctcaacgctgatagcgaatatgcagcaatctttgttcctggtgggcatggcgcacttattggtttaccagaaagccaggacgtggctgccgctttacagtgggcaatcaaaaatgaccgttttgttatctccctttgccacggtccggcggcttttctggcacttcgccacagcgataacccactgaatggttattctatttgcgcattcccagacgccgcagacaaacaaacgccagatattggctatatgccgggtcatctcacctggtacttcggcgaagagttgaagaaaatgggcatgaacatcattaatgacgacatcaccgggcgagtacataaggaccgtaaacttctcaccggcgacagtccttttgcagcgaatgcgttgggtaaactggcggcgcaggaaatgctggcagcttacgcgagttaatccctgttacattgtgatgtaagcgcataatcaatcgcagccacgttaatactcacgacgtggctgcgttttttcacggttaacttatggcgtactgaagcccgatgttaatttctttgcggtaacgtaattcggaacacgttatgcttactgagatagtgatacgtagcacttcctccatgtaattcggcaatcgctttgactaaagaaaggccaagtccctgacctacggaatgacgcgaattatctccccgccaaaatctacggaagagtttttcaggctcattaattttcgttccaggactggcgatatcaatattaagagaaccgttggcatcaagaaaactggttatatgaatacgcgatttttctggtgaatatcgaatggcgttaacaataagattcgataacattcgttgcagtaaaattttatccgcaaagatttgttgattgcactcgaccttaaaacgaatctctttctcgtctgaaagatattcaagatagtccaaaagattttcaacttccttattgagagaaagcgcatccagtttcaccaaaacattgtttttgtctgccctggcaagaaacagtatattctctgttaaccgcgaaatattttccagctcttcaatgtttccggcaattgttttttgatattcagcgatacttctgatttgactgagcgtaacctgattctgacccagtaatgcattaattggcgttctaagttcatgagcgagatcgtcagcaaattgactaaggcgctcaaaatctttgactaaagcatgatgcattttattcaacgcctgcccaagaggttttagttctctcggtaatgcgctaacctcaaccggcactcggctatcgttataattcagcgcttccgttacgccactcaactttttgatctctcgcaaccccgtcctgattaacaacggacttaatactgagcacaatataatggcgacaatgcaaattataatgctattaattttatactgttcaagcatattatgtctggctgaagccaatttagccacagtaaccgttaatgatggcgaaacttcatcaatgttaattcgtaaagcatctatctctgtatcattaataatgcttctgtaaatgcctgctgcgctgattgtctcactagcaggtatgttatttaacatgtcatcactgacatttgtccggttaacaattttattgatgccatcaccatgaatgatcaaaatatcctgactaacatccatcatccggttaaagtacacaggtaacgtatctggatttaccccatcaattaacaactgcttgatctgcgctgtccggttaatgagtgttgtatcatcgcgccatttcaactcacttgccaggccattatagagagtccatacaattccagcgccagcaacagacagcagcaatataaaaagcaaggttaaacggacggttatagataatcttttcattatttttttaccgctacgaatgaatagcccatcccccggattgtggcgattagcttttcaggaaaaggatcatcaacttttgcgcggagcctgcgaatggcgacatccaccgtattggtatcactatcaaagttgattccccaaatttcactcgcaataaccgttctgggtataatctcgccagctctggaggccagtagccaaagtaactgaaactccttgcgcgtcagtgtaatactgatattgtccctgctcacactttgactgacagagtccatttttaagccactgatttctaatgttgaattcaaagcgtgatgttgccttaattgtgcccgaacccttgccagcaactcagaaaatgaaaaaggttttaccagataatcatttgccccactgtccagccctctgactctgtcatcgacagaatcccttgcagtaaggcaaataacaggggtttgctttgctgttcttaacgtttgtaagatctgccagccatccatacccggaagcataatatccagaatgatcaatgcataatcatccttcagcgcaagataaagtccatctctgccatcagaaacggcatcaatgacataacccgcttcggaaagcccctgcgttacccattcctgggtcctttgattatcttcaataagtagaatcttcatgaaaataatatgccataaatcatatgttatagaaacaacctggttcattacaaaattgtaatgctgctgtaaggttaccctggacgttttttcgctatcctcaaaactcattcacatgacaaggatataaacatgttaaagcgttatttagtactctcggtagcaacggcagcattttcattaccttctttggtttatgccgcacaacaaaacattcttagcgtgcacattttgaaccagcaaacaggaaaacccgctgccgacgtgacagtcactcttgaaaagaaagcggataacggctggttacaacttaataccgccaaaacagataaggatggacgaattaaggcactgtggcccgagcaaactgcgactactggcgattaccgtgtcgtatttaaaaccggggactatttcaagaaacaaaatcttgaaagtttcttccctgagatccccgttgaatttcatattaataaagtgaacgagcattatcatgtgcctttgttactcagccaatatgggtattcaacctatcgtggcagttaatgcgtaaatatgtaaaagctgatctctgctactgttagggaggtgactccctgacagattaacagtaaacggctcttgttggctaacgacaaaaaagtgtgatggcttatgaaaaagaatcaatttttaaaagaatcagatgttacggccgagtcggtattctttatgaagcgtcggcaggtgttaaaagcactgggcatcagcgcagctgcattttctttgcctcacgctgcgcatgccgatctgcttagctggtttaaagggaacgatcgtccgcccgcccccgccggaaaaccgctggagttcagcaagcctgccgcctggcaaaataacctgccactgacgccagcagataaagtctccggttataacaacttctatgaattcgggctggataaagccgatcccgctgctaatgctggtagcctgaaaaccgatccatggacactgaaaatcagcggcgaagtggcaaaaccattgaccctcgatcatgatgatttaacccgtcgcttcccgctggaagagcgtatttatcgtatgcgctgcgtggaagcgtggtcgatggtggtgccgtggattggttttccgctacacaaattgctggcgcttgccgaacccaccagcaatgcgaagtatgtcgctttcgaaacgatttatgcgccggaacagatgccaggccagcaggaccgctttatcggcggcgggctgaaatatccttatgtcgaaggattgcgtctcgacgaagcaatgcatccgctcacactgatgaccgtaggtgtttatggcaaggcgttaccaccgcaaaatggtgcgccagtgcgactgattgtgccgtggaaatatggctttaaagggattaaatcgatcgtcagtattaagctgacccgcgagcgtccgccaaccacctggaatctggtagcgcctgacgaatacggtttttacgccaacgttaatccgcatgttgatcacccgcgctggtcacaggctaccgaacgatttattggttcaggcggcattctcgatgttcagcgccagccaacactactgtttaatggttacgccgaccaggtggcatcgctgtatcgtggcctggatttgcgggagaatttctaaatgcgtctgacagcaaaacaggtgacatggctgaaagtttgcctgcatcttgccggattgttgccgtttctctggctggtctgggcgatcaatcacggtggactgggtgccgatccggtgaaagatattcagcattttaccggtcgcactgcactgaaatttttgcttgcggccttgttaatcacacctctggcacgctacgcaaaacagccgttattgatacgcactcgccgcctgttaggcttatggtgctttgcctgggcgacactgcatttaaccagttacgcattgctggagttgggcgtgaataatctggcgttattaggtaaggagttaattacccggccttatttaacgttaggaattatcagctgggttattttgcttgctttagcgttcacttcaacccagtcgatgcagcgaaaactcggcaaacactggcaacagttgcataacttcgtctatcttgtcgcgatcctggccccaatacattatctgtggtcagtgaagattatttcaccgcagccactcatctacgctgggctggctgtactgcttttagccttacggtataagaagttgctttcccttttcaaccggttacgcaagcaggcccacaacaaattatctctataacttcatattgccgacaaacttcgcgttatcccggccggatgcggcgcgagcgccctatccggcccacacagatcgcatcaagttatgtttcgtttgtcatcaacctttcatcaccagaataatttattttatttcaataagatagttaaatacacctgagaataccatgctctcatttcctaatgagttgttgcattttttcatatgttacaatataacattacacatcatgtacattaactctggaggaaattgttttggcgattcgtcttcataaactggctgttgctttaggtgtctttattgttagcgctcctgccttttcgcatggtcatcactcacacggcaaacccttaacagaggtcgaacaaaaagctgctaatggtgtttttgatgataccaatgtacaaaaccgaacgctcagtgactgggatggagtctggcaatccgtttaccctttactgcaaagtggcaaacttgatcccgtctttcagaagaaagcggatgcagataaaaccaaaacatttgctgaaattaaagattattatcgcaaaggttatgcgacagatatcgaaatgattggcattgaggacggcattgtcgaattccatagaaataatgaaacaacatcctgtaaatatgattacgatggatacaaaatactcacctataaatcaggcaagaaaggcgttcgttacttattcgaatgtaaagatcctgaaagtaaagcccctaaatatatacaatttagcgatcatataattgcaccacgaaaatcatctcattttcacatttttatgggtaatgattcccagcaatctttattgaatgaaatggaaaactggccaacgtattatccctatcagttgagtagcgaagaagtggtcgaggagatgatgtctcattgatttttttgcgctgacttcagttatttaacagaacagtgcctggtagtaacaacaataatttaccaagacaaataagtaagaaaaactcagacacgctcatacttgagtcgtgtcttttttattatgtctgtagaaaaaaactgagaaaaaggcgaacaataaatacacaactcagccatacagattggcagcgcaaatgtctccaggagcaagtcatctgtcatggtaaagctaaccagaaatataggttaattttggtgtttaaaccttttttacttgttagtatgatacaaaggctttcaaaaaagctgggaaattcaacaactcttggaaattatggactttgtcccgcggctttaatctgacggccgcgttccttttttggctcaattattgaccccttatctacgcaacttcagttcccgccagcaactttgcggcagtttcataggatcaatgtctaaaagaataatggtgaccgataagaaaacgactgaataactgtagattttcgctcgaaaccttcctgtcagacccatagcgaatcaagtgctgaatgtcacagtatcgaacagaaaacagtgacgatctaacccttcaagaatattctacgattgttctgtttaggaaaagcaaggcgggaagtcgggagataagtcattgataaagtggcggagagagggtctaaatttttagtgttcgacaatgcccaccaaagtgctatttttcctttaaaaacaaaatattgtcattatttttttgttcggtagtgtattgctactgtgcaaacaatcagctattttatgcagtaccgtatgtatggcgggttgtatgacaggattttgctatgccaaagaaggccaaggaactctcaggactcgtcgtatcacgattaaaatccgaaggcatgtatgccgttggtggtgtggatggtttataccttcgcatccgaaatcagtcccgtgcatgggttctttgcgtggctatgggaacccgaatcaacaatctcggtagaacagttccaagacgtttgaatatgggtcttggcccttacccggaagtctccttagccgaagcgcgtgacaaagcgcgtgagctacgtaaacaaatccgtaatggtattaatccccttcaggaaaaacacgagcaaaaagcccggcaggaaatactggcccggaagaaaaagacctttgccgaatgttgtgaagaagtgctggaagtcaaagacagtgagatgaagaacaaaaagcatctcgcgcaatggcgttccacactggagacctatgcctaccctttcattggcaaaaaggccgttagtgaaatcaccaaagtcgatcttctggcaatactggaacctatctggttaaccaagaatgaaaccgccagtcgtctacgtggacgtattgaaacggtgatcgattacgccaaggccaaagaatactttgaaggtgataatcctgctgcatggaaaggtatgctgaaacctctcctgcctcagccaagtaaagttcagatcaccaaacaccatgcggctcttccctataaccagatcggctcctttatgaaagaactgcgtgaacgaagcggcgtttcgcctcgtgcgcttgagtttgccatactgaccgcagcacgctcaggtgaaattcgtggtgccgagtggtcagagatcgatcttgaaggtaaaacatggaccatccccgccagtcgaatgaaagcaacgaaggagcatcgagttccgttgtctgatgctgctgttgccctgttaaaggctttaccacgctttaaaggtatcaattttgtattccctgccactcggaagggacaactctcggatactgctttactggcagtcctaaagcgaatgggatataccgacttaacgcagcatgggtttagatcgacattccgtgattgggctggtgaaacgaccaactacccgcgtgaggtaattgaacatgcgttagctcatcagttggcaaataaggcagaagctgcgtatcaacgtgggacgttatggcctaagcgggtggcgttaatggatgattgggcggggtattgtatttcttagacatacttgcggatgacaaaagctcaacttcctttactatacggacaggtattcatatacaataaatttctaatcatatttgattaaaggtttataatttaaggacatacaatatgaattatatagatgaacatgatataaactactcacgatatggttttgaatcgcttgcattagctcatcccgaaatagatataaagggattatggcattgtgattcaaaatattatgtgttgattgaaaaggatggaatactcactgaggatgacttaaaggaatttgaaaagatacaagaagagcatcgtattattggtagccctaaattattactaacacaaacactccctaataatgcaataaaaatcgcaggaagagaaaactacgaagttgctctttcttttggcgcaccatacacagattctgagttagaaaacatactttatcaatatataaataaaaaatttcatccatttaaatacacacttaaattaccatctcttcatctggttttgtcattcccaagaaaattgagtgatgatgaaaagtcagaaataggaacaacattatacagcgtcggtattaaatatgtaattgattatttaatagatgattcattattaaactttgaactatctgaaaaaaggcactctgatgcattagcgttaatacctaataaagcattacctaaaagtgtcccaacaagagtaagaaacctgcatgaagaagatgaggatttctggcttgataacagaagtttaattctcacttcatatgacttcgaaaaaagtagtgcccttccaacaagttttaacaaaaaaaatagttgttgtttcgttgatgcgcaaatttttaaaccagataatataagaaactatttatcagtttatgaacgagtagtgatatcatatccactcatcggacaagacaatgacttcttagaccatttaaaaataccgaaacaacatttactagagttaatatcgagaggtagaattcaatttgcattaccacaaaacataataagatataacttatcatttcttgaagaatgcctaaacactaatcctgaatgcattattctgtccagacgattagcatcatcctcaattattgacatcagaaataaaacaggttttcttgctacaacattttctttcgaagaaaaattaaatgttctcaaaacattgagggcactggatggcaaaatattcaacttatttatcaaggccctatctcaaaattggcactcaatggagatgaatatccatgagcgtggagccatgggtgtttcaaacattggcatagcccccgtcatgtcagagttattcaataggcaaggacgagaccttcttcttgaactattattttctgctatgccattggagtgggcgatggcattaaatgctgatttttatccataccacagcaatgagcattcacaatataatgcttctgcatgttgtttatatggatataatggttttagaataaatgaagaggctattgtaaaatctaaaatcggtgaaatagcaacaagaatactatcaatcgataatgacatgtcagccttagaattagacgacgcaatacttaaaggtgatattccgaggataagggatttttcaagatcgttgtctaatttatcaagtgaagagcttgatataaaaatttacgaactaaacaaagaaataaaaaaaatagaaaataaagaaagtaaactttcttcattagacttatgcggacttatagcatcaacaataggtgtttacgatgacaatccatatatcccatttggatttgccttttttaaaataatctctagcgtgttaaattcaaatgatattagctcgaaaaacatcgataaaataaaatcaacacttttaggtacgcaaactgaaacattgttaataaaaagaacgaaatccagaatgtaattagcatgcattttttgtaaattaacatacatgtcatatttttaccattatctttggcatgtatgttaatttgtaacaattaatagtataaacgtttaatgggaatttaatattttatttgcatgcatataaccttctaaaattactataacagtgctcgttcttactaccactacaacgacgttcatcatattccgcaataagtgttccagataaaaaaccataccttgagtcatacatcgaccccggacaagcacatgcacctgtatcactattgggtattacacatttatatccagatgtttgatcggttattgttataaaaatacctttcaggccatcaccgcttgctgtctgccatttaccactgacacacgataacactcgacctgtactgtctcgccccaccagaccattaggcgtacatttcgcatttaatgttgcctgaccattcaaatggagatattcacctgctttgattctgcctgttgattcaattgttccattggattttatcgttccagcagtaagattacctgacgcataaatattacccgcattgttcatgtaagctttaactgttttacctgttcctacaccaacagtccctgacgcatacaaatcataggtgcgaacaccaccagcccacccagcaggcagatcgtttggattaagtccattcgtcgcgatacgactaccaaacttcgccagacctgttgttgatagcgtgttcagataggtgtcggattttactttcaggttgttgttgatatttacaggaccattaagggtagatgttccacccacactcagatctgatgcaacagacgcattacccgttgtcttaagtgctccggttgttgttgtccctgatgccgtcatatctttgatgtttttgatgctcttcccaccaagattcagatcgcccgtcatcggcaacgtcccatcacgacgcagataaacagaatacattgaagagttataccccacgcggtaagccagtaacccaccccccgtgatattgctgtagctattagagttctcactccactgaccaccatagccggacgctatcttggtgtttctgctcatcccaccatcaacacctgccgcctgaaccgcttttcctaacaggtcataacgaatacgaccaccttcctcccacgggctggcggttgttataaggccattaatgacataatcaggcgctgttcctgaacgctttaacacaatcttgtaggatgctttttgcgcgttcgttcctgtatagcctacaggtaacagaccttcattaattaatgtctggtaagtgatttcacaaccagcagccgaacaggttcttggccccggatcgctactttgattgttggatgatgacagtgtggaaatcttgtcataacgaatactgatatagcggttaaccgcttcaccaagctgtttaatctgtgttccgacattatcagccaataccgcttcctgatcgtttctcatatcctgaaacttcataaaagcgataagcgttccaatacctaacacaatcgtcacttccagtaaggtaaatccttttttctttatcataattatctccctgttttagcaataagaaagaaaagggcctgcgccctcttcattaaatagacgtgaaaactaatgtattacttgtggcattcgtacatgctgctgccgtagctgccacatcgagtgttcctcctgcggctttaacaaccttggttccaaccgtagtaatgtagaaattacctgccgccgctgtcgcaatcttcacacattccgctgctggcacattatcgtatgtgatagtgaaagaagagccagtcgctgatgacggacctgtcgctgtagcagccagcgtcacattacctttaaaggcattgatgggtttagcagccgttcctgacccacttaacatattgtcagggaagatttttgcctgaacagccacagtatttgtcaggccagtaaagcttgatgccgacgtgtataacgctttaacacctgcctgtatggtggcaatgttattggattctgcctgcgctctttgtgaagcctgaaccttgggataaacgataaaagcagctaccactaatgcagcaatgatgcccaaaacaagtaatagttcgagtagtgagaaacctttcttgctttttcttttgttatttaataaaaccattattatctccttttttgttttaatgataactcctgttataacgcttctctgatatctggcaatagaaagagcaagatatatttaactctgtctgacagacggatgaattaaaaaaggcaaagatttctctttgccttccgggagatttaaaaacaatatttgttatcactactactgtcattactacttcctcatgggatatttatcatatctgataaaaaagtaataatgacgttcactacataaagataaaaattaacagattactggtcaaacagaacgcatgattgaaaaggaaaaaaatattaataaaggattatcctgcattctgttcttttatatagataacagataataattagatatcaatacctgaatcaaaataaatttaaagatttttatttttgtcttctatccatttgcgcgagaaacttcctgcctgcttttatatacgttattctttcaatatcattcaggtcagatactgaaagcaaaatccccataacaagctctttatccacctgttcgatatcgcaatgcatagccttagctacttccgcaccaagaataatctttagccttgtttcaactttcttacgttctgatttctccagagacttaagacgattaagttctagttgagcaaaagcaaccttttgctttaatgttttttctgttcttgtttttttactttcattatccatagttatcacctcttgctgtttatacgtatttaattatcacaaagagaaataacgtcaaatttacaccattttgtaagagagaatgattctgatacatttctttataaatatgtgcaacgcatatgatagtaattactaacttaaaataccccgcactctccgcgttacttatttttgcgcattcgtgcttttatttttacctgtcattttcaaactctatttcccaatctcaacctgtgaattgtgcaacacataacactgtctgttttattcgtttttttcatcaaatttagcagccccgccttacggcgggaataattaatacttcttttgcccttacgggccttatctttactctttttgtcctgtggacgtgaaacctacacctttaatccagtttgcgccgcttaacccggcgtattattttacaaccatacatatatttcgtattaattaataagaggggcattttacattggcttatttttttaaagacaatgcccacctatacactgctacgcagtgtgtggggtctaccgacggttgcctgccgcaggctaaaagcaaaaccaaggtcaacgtcaaccccgaagtttttcttacgaaaaactaacagtagcttatatatttgagattatatttttaatggcgatttttcatctggattttaaaattgtgaaacgaagcgaaggcatgacttccgttgcgaaagctgcctaccatgcccgtacacgtattacagatgatcgcattggcgaaacatttgatttcagccacagaacagatcttcatggtcatattttattagcccctgtttcagcacctgctcacattgttgaaagttcctcagcactctggaatgaagttgaaagagtggaacgccagaacaacggtcaaacagcccgttattttgatgttgctatacctgtagaactcaacaacgatgataagaaaaaattggttgccgaatactgtcagaagaactttgttgataaaggaatgattgctgatatcgcatttcatgacttggatagtaagaatccccatgctcacgtcatgttaaccctgaaaaccattggtccagacggcttcggtaaaaaagacagaagctggaatgataagaagataatgatccaatggcgtgaatcatgggccaccatgtcaaacagctaccttgaagccgcaggcagtgaagaacgtatcgatcaccgttctctcaggacacaatgtgctgatgcccttgctcaagcagaggaagcattcagcgctgaagagaaagcattctggcttgccaaagcaacagaaacaaaccgcccggcaatgcaacgtgttcatcgtgctaaatggaatgacaccgagtcacaggaacaacgagctgccgaacaagctcaacgtgatcagcaaatagaggaagcgaagaaggtctatacgacattcagtgagctaccactggagatcgtggttgatgtcagaagctttacgattacacatcttgctgaacccgaagagatcattatccctgactacccagcaacagtagaaccgcaaccggctatggcgacacctaccacaagcagaagaccagcagcaaaatcttaccgtaatcccaataaggtcagtaaagtaaatgtttcagggaagaaatcccctgttctggttgttcctgaaccaaaagcatccactaaattgaaaaccccatctcttcaaaacaccagagcggtgaaccgtgctcccctacatatcagaaagcagaccaagccacgacaaaatggtttgtttaaacgtttcacactactcatcgtagacttcctgaaagagagatttgtatgggcgagaaggaaaactgataccactgatgctgaccatgataagcgtatcgctgaaaattatgtgtttgatgaagtgctgggtgtcaatgttccacgctcggagtttgaaagacgcgctaagtttaacaataaccaaacatcacaagaagcaggagtctatggtaacgaatcaaatattaacaagactgttcgtttcccaaatcgttttgagcaagaacaaacggaggtcaataaacacatggaatttatactgtctattggtggaaaaccttctatgccaaagttaaaacaaactaacagaaaatctaacatcaaatagtaatgttatccccactattaatttttaatcaaatgcatgttacataggctcaaaatgtgatagcatatgaaaacatagaattttttatatgcttggtgaatgttttgggcaacaatatgtataatatccttttcttcatctttctttcaatagcaattccattccttttattcctcgcatggaaacagcacctaaaaaccaaagagattcgttcatatctattgaaagagggatataatattattttcaacggagaaggtaactcatatctcgcgtttaatattagtaatgcgacatttcgcgcaggtaatttaacttccaatgattattttcaagcatcaatttcttatatccacgattatagatgggagtggaaggaggttgaggcaaagaaaataaataatatatttattatttacatttcgaatattgatttcccttcccaaaaactattttatcgcaataataaatctttagcagaaatagactgggcaaaattacaagcaatttttcatcaaccatatgaaatacagaatgacgtcatgcaagataacaataatacgcactatgattttttcatatcccatgcaaaagaggataaagatacttttgtcagaccactggtagacgagttaaatagacttggtgtaattatttggtatgatgaacagacacttgaagtcggcgatagcttaaggagaaatattgatttaggcctaagaaaagcaaattatggcatagtcatactttctcataactttctaaacaagaaatggacacaatacgaattagatagtttaattaatcgtgcagtgtatgatgataataagattatattgccaatctggcataatatcaatgctcaagaggtatctaaatacagccattatttggcggataaaatggcactgcaaacttctttatatagcgttaaggaaatagcaagagagttggctgaaatagcatacaggagaagataaagcaataaatcataagtgcttaatatcttcgatgcataaaattaattgtattagcacatctaaatagtatgtttgttatggaatgagtgttccgtgctcattccacatattgtttagtatacgttgaaatattacagacctagcttagtataaacagatgtagggtatagataactaccactatttgaacttgagtaatagttaacacagtaattatctaatgcatatttaataattttaggttggaaagagacagatactgtataatgttctgaatctaaaagtggtttaggaatgaagttcttatcgactgttctatctccgtctaaattagctattacaacaggaagattaaattctacgataagatctatttcatgggcaagaaacgatactccatcgctaccttttctcttagtattaccgcttcccaacagtactacttgtttagcatttttcatcctttcgcggaggtttcgctttatggtttcaggtttacttgtatcccttgaaataaagagatcatgagcatcaaaaaagttaaagtctattttttcatttgctttccatgcctccataagacgataaaactttatatcttcacttgcaaaagccacatatgtcttattacgataactcatatagtccccatgaagcagtcaacattagtatcaacatgttgaaaataccttatatatcagatagtgtaaacatcatttataagaaactactatcaacacacttgaattacatataattaacaaggttggtacaaaaatggcgaaagttaattttttcgataagcgtatacttaaaaaattttcagactacacatcaactattagtaccatattttcactttttttgatttttgtagacattccaacagaaaacaaactaacacttggtattatatttttaattattttattcttactgtatttcggcatatggtttaaatcaaataatctttcggaaattaatttagatgttgagggcagcattgttactgtaaaagcaggcgatttattcagacaagatggattcaaggtcattgcttttaatgaatattttgacacgcaagttgatgatgttatcatttctcataattcacttaatggattatatattgataactatttagcgggatccgtatctgatttggaccatcgtatttcaaatcatcagtttgaagaagatgaactgcttgaggtcaaccataaaagaaaagtgggtaaaacacaaaaatattcgctaggaactatcttcgttaataatgattatctattaactgcgttttcaaaatttgacgacaaaaatagagcttttcttacaatgccggattatctagcatttttaataaatttttgggacaaagttaatcgtatatatgctcaaaaaagtgtctctgttcctatctttggatctggaatcactagaataaaggaacataaaaatattagcgatgaggatttacttaaaataatgttgtggacttttagaataagtgaaatgaggtttaaatttccggcaaagcttactatcgttatccacaaagataagatagataaaataaacttattggatataaaatcagcgagaaatggtctttagttatatttatatatgggcgaactatgaaaggtcgcccatcatataattcttttcgttttttatatctttcgcctaaacacaacattatcagagaatatcgccttaccagctataaacccaacaaccgcaattattggtagactgatagtagctcctgccatacctgttgacataccgatcaacgtcgataaaccaaaagtcaacaacaaaacaacagcagcataccagccgggataagtgccatataacacagtcgctaagcaacctgtgcaaacgtgaaccccacgctggctctctttgaaacagaacgggcatttgatggtattgttttccatattggtttccttaattggctttccagccattgctggtcttaaagagattcatggcaccatcagcaggttcattcattcctttaacgctggcgaatgcttttttgtcaatccagcccggaacgtcaaccagcttccacgtataagtcacgcgaactactttctgattaccgtttcccggctcagtccattccttaatcccgtcaacagcacgacgaccaacacaggcaccatctgttgtgctccagactttggcttttttgccttcctctgttatccctaatacgttcgaatcatagccctgctcaaagaccatcattccctgctctacaaatccatcgaggatcactgaattcgtccctgtaccagtcgaatcaagtcgtggcttggcaagacggatggggaagctggtgttattgttatccagcgagaagcaatatttgtcctgccctatcttggcattgatcgccttctcaaaatcacctttctcaccacatcccgccagtgccagagctgcgccagcaacgagtaaaatcttcttcatctgcttatccatcctgataatcaaagtgcctaaatttttgaccaaatctggtcagggctagagttgttgcgggatccggctgatatcacatggcaaaaccaccgcttaaccaattgataggattcaattcttttagcgtctcgtcatatcgtttaaaacgatcaaaaacaacctcatgatagccaatagctatcataaataaatattcgatcgataaaaacaattaataaccgatcaatatcattgttttaatcgttaaagcctatcaataattaattatcgatcttttatatcgatcatgatttcaagttctgatagccttgcaacgccgagaccgacgccatgagcttggtgctgtaggacgtataaaacgtagcaaagctctgtgagcaggttcagtctctttaactcatttacatggaggaagtaagattggaagcagtaggtatcgtatttttagtggtgctcttcatcatcatcatgacagcagtagatatacaaaagaaaaagcactacaacagctttacggaagttctggacggcgacattctttcgtatgaatgccaacagacaggtattgttattgatactcaaaaacatactgtccgtattttcaataaagataaagacagcacatatacttttgatcaaattcgagaaataaattatacgctttcagaggggggtaagttttatggcaatggaacattacgaggtatgaataatgcggctattgctaactggagagaacaactttcagcgaataaacggtctggcctaaatattttaaccgatgatattaaaaatcccatgtggaaagttaatgttcccctgaaaaatttaagcacctcaaatcacgaactttgcgagcgatggatgctggtatttaaaaagtatgttttctgagtctcacctttcatctatttctggaacaaaaatgaaaaaattattacttgctatttttataatattaccacttggtggctgtaccgttcatggtaataaatccctaactgatgaaaatcatcagacggttaaagttaaaatcgtcaagggaaaaacaacccaacaagaaattcttgctgcctttggagagcgctacgaatgatggacaggagatgtggaactactcaagtatgacgggagaaagccaactatctaactacataccgggccttgctctattgaccaatagcagcacagcacacattaaatcactggatatctggtttaagggtgatgttgtggaacgttatgattttcgtcagactgcaagtaagacctcacgtggtttgatggattgataatacaacatatcatcgtaaaatcgggagttgctacgtatgaactcccgattttatttcatgatattatatcaattaaatactaaataaattacataacaaacacttcttgtatattactaagcgtcttagcacctataccttttatgttttttaaaatatccagatcaagcttgccttcacgaactcgtgctttaacaatttctttagcgattgttctatttatatttaacaatgcttccagttcatctaaagtagctttattgatatcaggcttagatacagaggttttggtatttgacatatactcaagcaaatccgccactactaaatacgtgtgaaatactgactttacagcttcaatccgatctaactcggcatgaacacctttatttgttaacttattaactttatctaaccatgatccgagaaaatctatatgtgctttggcaaggtctttattactatcagactgaatagccccatccataaatgcccaaaggcggtttacgtattgaccttgcccaacggcccgaccattaaatttttccttcgatgccggataaagttcatcagccaacccttctagaagcctacgacatgtagttaaagcttgagaccattcttcttctttatctgaagaaatagctttaaatgccaacattagttgttctgcgatcactggatttagatctaataatttatcatcaacagcatttttcaatacatcaaaacagttgctgacagtacctgaaaattttagttgattatatatttgcgatgctaattcatgtgctttttttctaacataattgatatgttgatttaaactattcttataatacgttccgtcattgccttgtttttttcttacaagatcggcatatttctcttcaataaacccaatgttattatatccaccaccactttcaatattttttaatgtgagttcttcatctgaataatgtatattagccttaactcctaatttggcaagttcttgtattcgtttgtctaaattttcttggaaagatttattttttgtattttcagcctcaataacaaacttaagcaattcagttattggctttgtatatttagtatcacctaattgaatagcacaccatatctttttatcatcatcattgatgatatccgaagtccgctgtagtttttgtatagccgataacaaagaaccttttggtgactcgagttctttaagtgtttcttcaatgagctgtaatgctactttcttgtgtggcatgtgaatcatccttcaacttatagcttcgtaatcattaagtggtagattgttgcttttaaactaaaaatgaaactctggtggctcagccattttaataccaccaatacgtatgggcagctcaccttctcgttggcacaggttcttaatagattgccactcctcagcttctgtttccatgtgagcagcgaccgaatcaaaagcaccttcggctacgactatagtaggttctttatctgtttcattgccattcgaatccacttttggtacttcggccagttcttcttccagcccagccaaactcactttcagttcatcaagactactggcggcgtctattggcgcatagaagaacagcccactgatgaagatagcttccattacctcactgaaagaaaacgaggtatcgccataaacaaagcagccatgcttggaactcttcacccctgatacattcttcttcaacaggccgtcctttgccgacgtcatcaacgcctgtttgctatagaggattacaggaagatttttaatttcgtgaacatcaccgctgatactccagcgttctttatcacctttaatgaaacctgaagcatcgcagctactttctatgtcaaactcatcagtcgggaaccgctcacgattaaaataggtcgaaaaatcttccccttcttccatatcctgacgcttgtaagcgcgataaaccgagctacgacggtcaatcccaatccattcaatatcccatgtcgttggcccggacggttttcttacctcatctatataagcaccaacatctctgtccagataagctgctaacagtgccttccacagttctattgccagaaagatacttgccagcgatgttccttcttcaatcagaacagtatggtggaagaagcgaagaagaaagaagggatcggtattggctatcgtgttctggatggatagcaatggaaccgccgaggtttcatcgtaatcggactgaaaccgcagtattgcatcggaacaaaaaattaatttaccttccatcgctcatcgcctcctgacgctatcagacaacgcattttaccagaacactaccacttaccgcattcgactttaacctgacccatgttcgttgatagctctggatatatattcaacccaaaagcattgaccttatggataacatcacaatatctgaaactgataactcagattataacatctgtgattttatagtttcttcactcatttgtgtgagttctgaaaccaagcgaatataagtatttttcaacctatctttatcgcaacgacttacagactccgataacagataatggctataattattgacataaatatcattgtcattttcaatgagtgagttttattccatgttcagtatcttctactttgtttacaatacagatcataaatggtgttttctcatagggatgaaagagtgttatcattttaatatttttcattttattttttacttttttattactatttaatacaacatcgcgatcgtgaaaatcaaatttatttattttttaaccatgattttccctcttatttttaaactacttttgaaaaaatctttatctctgtgctgacgcacggctacgccctgacgctgacatttttattttattcatctcctgtctgttaaataaaaagaaaagcactcgatcattgtttgatctcttttcctcatgatgctgaatttagatcctatgtttaaacatagtttttccctttagacatatagcatttgctcttaaacgtataggaaaactacatccttggtagcagcgcttcgtgattgttgcgaacaatcactctgctgaacagggcttgcccctgttaatattggatttatccaaaaaagatcgcgtcgtagacgcatataaagttaaagtaaaattaatcaagcagtcccgatagtagcagcggttcatgattgtagaaaacaatcacttcgctgtaataacatagtaggaaaaataacacagataacaccactggtgccattttgataaggcaccaatcaactaaagagaagaactattttcaatattacattctttaaaatgtcatccaaagcttcgctatttgaataatgaagaagaaaaatgctctcaagccagctatagcttaaaacaaagtacgcactcttgggagttaaagtcccgaatcccggtacttaagttgataactattctcaaataaaaataataaagtgttattgtatatattctgtagcactacaatttttatacgtaaaaacatcaagtgttagttattttaaaaaatataaactttaagtattgacttgcacacaaaatatagtatctacttaaatgtataactaaaaaaataaaggagtaaataccatgatagaaaataagatacaaactgaagtaaagaaatcaagaagaggtctcccacgtcatactaaaaacccatttcttaatgatacaagtctacatacaaaaactggcgtcagacgtattactacaggaaaagatcgattagcattagttaatgagagtacgggagaacaagttggtaatggtggtttctttcagtctatggaagtagacaagacacagtttgtgaagctttatgtggatggcgtatcagctattgagggtttatcctcatccggtaagaaagtattcaagatactgtatcttgctatcagagataataaagatacagatacgatattaatgtcattcgatattgttgatcaagatatcgtgaaaatatcaagaactacttatttcaaaggtatgaaagaacttgctgacaagaaatttattgctgagaccatgatacagaactattattttattaatccagactatatgtttaatggtgatcgtttaactttcatgaaaacttattacttgaaggacaaaaaaactaaaactaaagagaacaaaattaattgccaaggcaaaacacagtagtttcaagaaagagattttctcaagcaactcctatctgaatgataactccataaagccaatgcattttaacaaactcccaccctactataaaaattgtatagggtgattaaaaaatgaagcgaaatcgaatgagaaaacgttttttatataccagtttacaaactcatatcttggagagctgctttttatcattgctgacatatcaattatattatgtgttgatctacgtagttctgatatatagagaacaaaatcaacatgttcataatgtggattttcaacaagaaaattaagttctgccattacatattcagattcataaggcattatcgattcattaagaataacaagtccaccgactgctctaggaatatttaaagattcctttgttgctctaatctgtctattggaggttgctacaagatcttttatatttctataagcataatccattatcttttttctgaaagcatctgagtcggggtgtttttgaatcaattcctcaatatgaaccctaccgaaccaacttcttttaagccattcatcagtcttagctagctcattaattttttcatttattaaatcagttctgtcatttgtgagtaatttttgctctaaaataacatcgttattaaataacaaataatctgccattttcgaactagagccatcgtcttttttgaaatcatccttcatatcgtccaatactatattatttttcttagatcgaataaaatcaagaaaccttttatctatagaatccatctttcctaccttcagttttatttcatcgtcccgagcctgatgatacaccatgtcatttgtctcttacaacattattaatgtattaagcatggccataataaacaacaaaaaaacattggcgagacaaatcaacagaaataaacattgctgcaaacggttaatttgacacttacaccatatctcgtaatataaatatatccactattttatccacgaggttttatatgagaaaagtaaaaacagacaacagtgatttaatcgaatatgtaaatacagttaaagaactaaaaaatcacattccaatagaagaatacagaaatgaatatcgtaaactgcgttctgatgatattccattggttaaggcgcaaaaatttaaatctgcccataccgaagttcgcaggttggaaaaaaagagagaatctcttattgaatactttattgacgagttaaatcccatcagcagttcaaaagctaacacatcagcaagatcaactggtaatctcgatttatttaacgaacgcgtgttataccgtaaggccatttcagaaaagagcgatgaagaaatagtagccttggtcataaaacaacgtacagaagccgctgttgagttccaacgttcaattgaacagagtcttgagcaactatctcgtatctcgtcagagttcgaaccatcaaaccaaaagcgcaggaaaatgtctctttaaaacgactctatgctattcgtgtgaaatgtgatgtattagattgcttatgcaataatgtttactatattatttactgactgtttttttttgatttttccaacagcaccgtaagcattatttttattaatcgcctattttaaaacaccggatgacatactatgagtgaagctcttaaggcactgaacaatattcgtacacttcgcgcacaggctcgtgaaacagatctggcaactctggaagagatgctggaaaaactcaccacaatcgttgaagatcgccgtgaggaagaaaattcagcccgtaaagaacaagaagaacgtcaggctaaactggaagccttccgccagaaattgttagaagacggtatcgatcctacagaactactcgcttcagttggttcatcccagcctaaaaccaaatcaactcgtgctcctcgtcctgctaaatacaaatatacagatgaaaacggtaatgagcagacttggacgggtcagggccgtactcctaaagcaatcgccgctgctatcgaagctggtaagacactggaagactttgctatctaaccgctacagcatatccgggcttcactgttctcaagataacaggcccggaaaatattcgattattcatccaagactatcccagtctggcaggttgttaacgacctttcgccaccaatgatacgcagccataagaacaccaaaacaaatacctgcgacgacgcttgagacaaatgcagtgcccggttgtatccctgtatccttccaagtaaaaaaccacatacagatcccccatgccggaccaaaccatccacccatcaacaaagtgatttgccagaatgaggcaaaaggtagcggtggtatcttgagtccagctttccatgcgaggtgtagcaaaggaggggcataattacttcgccacatcctcttgctttccatgatggcaatagcgtgtttctttttagcttcaaagcccataaggttccttccagatccacctttactcatctatctatcgataaaaagccacaatagacaataatgattatcaattccatgtatgtaagtcaaaaataactcaaatagtcattcctttagatcttctggtgaaacccggtcacatgccattttctcaagcattctttgtaatcttttcattttcaacttatgtgcttttttctcaccaatctcctgatagtattcttcacgacgttcgttgaccacgctcctgaattttttcaaaagctgttcaagtgttttgatgtcggtagttgcggcttccacttggatttttttatacatatacatcacatgaaattcatcaatcattttttgctccttggatagaaaaataatatttgttatcagccccaagaaggggccgatagacctcagaacatatcaacatattgattccgccagaaccgtataatgcattttggctaatgcctgcttaacccctttaaaatccacttcagacagttttccagcagcgttctttttccatgcttttttcagaagatgtttctcagcattcctcatcgccagatcgattagcttacaaacaaactcatgatccattacatgcgttataatcatattgctggtcgttttatcctttgagttaaaaagctccgcatagatatgcaaggacacaacataaaagatttcagtgtttttatttttaaatgtattcatttttatttcctctttagtttaatattggaatagcaaaatatttgtatgagcattagcggtatacacacttatagacaatccaaagctgacgaaggtgttgctttaccttacagtggtttacttctccataaatccgattccttttgccttcttctgtgtcatcgtaaaaatgatatcgcgtttttttaatgatactttccataatgtcattcatattgtatttattgttgagaaaataataaaaatcatctggtgcattccgccgtaatccgtccatatagttcctgaaataacattcggcttgttcaataaactcttttatcgtaataagttctatcttcatatttttctccattattgtttagggtaataagatgccctgtgcgaacagatatttgttcgacacgagatcttgtttctttttttatgcagcgttctggcgtgagtgtcgaatagtcacttcaatccattcatcaatctcactttcaacaaaagcgacacacctcggacctatttttactctgtcaggaaagtttccttccttaatacgctcatataaagtcgtgcgactaaatcccactcgatttaaaacatcaggaacgcggataaatcgttttacgctggtttcaatattttctttcattgtctgccctctattattgtaagtaatctctatgagatttcgcttttctctatgttgtttcgacgtgaacaatgatagcgattttgcttatggtaatttagggacgttcaaagaagttttttttgaaaaattcgaaggggcacggatggaaagataacggttaacactggatgcgatcacgttcgcacggagcgaacgtaaccctttttacttggcttattttttcttattcctgtcgtcttctacatgcttttcaacaggggagtctttcaagtgattgttttccatcatgtaatcttcaagcgatttcagatagctcgcatccgtcagaaaagccattgctaacgggtagtccgttgcctttagcattccttcatcacgatcgttgtcgctgtcctcgtgaagcagcgaggaaatcagtgaaagcgggattttaatgccgttatcttctccccagaagatcaggtccatcatcgggataagacgatattcaataatttttctgaatgtgcttttcccaaaacgatactctcttggcgctggagacttcatcttaagctgtctcttccatcgggggatcaacactttcagatgttcaatgatctcttcggttgatgcttcttccagatgaatatcgacagtaatacgtgaaagattattaagggatgtctctttcagatactcggacagaaattcagactggcttaacccagagagttcaggcgtggcttcggttaatgccagcgttttcgcataaaattgcgcgtggcttcgtgtcgtaggatttactgcgtaggttctggcaagctcatgtccaagagtagcggtatcaccactgaaaaagatttcaccgctgaggatcttgttgcggtaatcatccagcattaatcggttaaaggtaggtatggtgttccggctcaacaacattctgtaagccaagatgcgccgctcaacctcaacataaaaatgctgtaaggtgagtttctctatcgcctcatagcgttcaacatcaaaccatgcttccagtgctttcctgatttcacttcttttcatccatcctccaacaatccatttcctttgatatatcttcacaggatccgtttggaacaattgaagttcaactgttttgtcatcagagacgggggaatggctaagttgttgttaagagtgtgaactcgagagcataaaagtggatgcccgacgcgcggcaaaatggtaaaaaacagcatcagtagtaagaaaaattgagcgagagaaaggaattttaatgcagggatttatgcatgacaaaatcaaaaatgctttgtaagtgattgattttgttgaatgattggcggagagagggggatttgaacccccggtagagttgcccctactccggttttcgagaccggtccgttcagccgctccggcatctctccgttcagatggttgccatgatgccaggaaatttggcattttaacagtccctgtccgtgcaattttgttcaagtgacgagtttgcgagcaaaacgatgattaagtggccctggaaagtacaagaatcagcacatcaaactgcccttccctggcaggaagcactatcgatcccccttttaacgtgtctgacagaacaggaacaaagcaaattggtcgctcttgccgaacgttttttacagcaaaaacggcttgttcctttacagggctttgagctgaattcattaagaagctgccggatagcacttctattttgcctgcccgttctggagttaggactggaatggctggatggttttcatgaagtcttaatttatcctgcgccatttgtggtcgatgatgaatgggaagacgatatcggtctggtgcataaccaacgtattgttcagtcaggtcagagctggcagcaagggcctatcgttttgaactggttggatatacaagattcttttgatgcttctggttttaacctgattattcatgaagtcgctcataagctggacacccgtaacggcgatcgcgccagcggagttccctttatttcgttgcgtgaggttgctggctgggaacacgatcttcatgctgcaatgaacaacattcaggaagaaatcgaattagttggtgagaatgcggcgagcattgatgcttatgctgccagtgatcctgctgaatgttttgccgtactttctgaatatttctttagcgccccagaactttttgctcctcgtttcccttcattgtggcaacgtttctgtcaattttatcaacaagatcctttgcagagactgcatcacgctaatgatacagactcgttttcggcgacgaatgttcattaattaacaactttgcagattaattaaccaattgaaatggcttatgaaatttagtgttgacagacaaggtaccgctaagtaatatgcgccccgttctcacgattcctctgtagttcagtcggtagaacggcggactgttaatccgtatgtcactggttcgagtccagtcagaggagccaattttctgttttcttgcatccttgcgaatctttatctgatgttgattcaacaggttagtgtgaaaactcttctcggtgcattttgattttaccctacgcatcgggaaaaattggtggtcaaatctggggtcaggttagttcgataatggagtgacccccatatatcccttaccgacgcaaaaatccgcaccctcaagccttctgataaaccctttaaagtctccgattctcacggtctgtatctgctggtcaagccgggtggctcccgccactggtatctcaaataccgtattagcggtaaagaatcccgcattgcgctgggtgcctatccagccatctcccagtctgatgcgcgacagcaacgtgaaggtatccgtaaaatgctggcgctgaatatcaacccggtacagcagcgggctgctgaacgtggctcacgaacaccggagaaagtttttaaaaacgtggcgctggcgtggcataaaagtaacaggaaatggtcgcagaacaccgccgaccgtctgcgtgccagtctgaacaatcacatctttccggtcatcgggaacttacctgtatcagaacttaaaccccgtcatttcattgacctgctgaaagggatcgaggaaaaaggtctgctggaggttgcgtcccgcacacggcagcacctgagtaacataatgcgccatgcggtccatcaggagttaatcgatacgaaccctgcagcaaaccttggcggcgtgaccacacctcctgtcagacggcactatcctgccccgccgctggagcggctgcctgaactgcttgaacgtattggggcatatcatcagggccgtgaactgacccggcatgccgttctgctgatgctgcatgtgttcattcgctccagtgaactgcgtttcgcccgctggtcagagattgatttcacaaaccgagtctggacgatacccgcgacgcgagaacccattattggcgtgcgttattccggccgcggggcaaaaatgcgaatgccgcatatcgtccccctctcagaacagtccatcgccattctgaaacagattaaggatatcaccggtaataatgaactgatcttccccggcgaccataacccgtataagccaatgtgtgaaaacacggtcaataaggcactgcgggtgatgggttacgacacgaaaaaggatatctgcggtcacggcttccgggcaatggcatgcagtgcgctgatggaatcgggtttatgggcaaaggacgcagtagaacgccagatgagtcatcaggagcgcaataccgtgcgcatggcttatattcataaggcagagcacctggaagcccgcaaagcgatgatgcagtggtggtcggattatctggaagcatgccgagaatcttatgcaccgccttatacaattggtaaaaataagtttatcccatagtatactaacgaatcccacactctggcaaattaccaccacctccacaggaggtggttctatatagacttttatcaacttcatgacgaaaaacacctattttatcccaaaagaagacaatagagtcacagaggaatcaaagagcgactcaattgtctttggacaatctggttgtgaggttagaaaacagttactcctacaccattaaatagggcgcaatgctcgctaatttctcccgggtttctgtcagttcgcgttccggcgtagattgcgcgatgattcccgcccccgcctgtatccagcagcgctggctatcctgaaatacggaacgcagaactagcgccgcatcaaagcgcgtatcgtccagcagcaggattgcgccggaataaagctctcgcggcgtcttctcaatttgcataatcgcgttcagagcagcatttttagggatacctgaggcggtaatcgacggaaacagcacggtaaacgcatcccaggcatccttgttttccgcaagctgaccgctcacgccagaccccagatgctgaacgctgccgcgctggcgaaccgacattaaatcttcaaccaccacgctgcccggctggcaaacggcctccagttcagcaatagcttctttgacagaaaggatatgctcaagcacctctttactgtcgtgcagcagttctgcctctttcgccttattatgctccgggtttcccatgcgatcgcgggtgcccgcaagcggttcagtgaccactttattgcccgtcactgacatcaccagttccgggctaaagcccagcgcttcgcgtccttcctgacggaacataaacgagcgcacaggcgtgtttgcctgccgcccgtataacagcgtggcgggcatatcaatccgcgatggcaggggaatggcgcgcgagacaatcactttgacatactcgccacggcggatctccgcaacggcgcgcgcaacctgttgtttatatgcctcaccattgagggcggtatccaccgccagtggtgcgttctgcgtcgttgtaccggcctcttttacccactcgcacaaacgtcggcacccgtcggcggagtccgcataaacggtgacatttcccttttcaaaaataagttcttcacggggaacggttaacgtcagcagcggccactccccggcgttaaaggcaatcccccgcgcatgcgccgcaaagttgaacccaacctgtccatatacccgacgtcctttcacctgaggatgcgccataaaacgacgcgcgcagtcggcaatggaatccaccgcccatttttgctccccggcatcatcaataaatgtcgcctgcgttccgtcggcattaatgtgcagccgtgcctggcaccctttgcctaaataccaacagggttgacgctcatagacataacactcttcttctacgaactggcgtaaaacgccagaaatcgtcggtagccattgttcctctggtaacgccagatgtagaaattcactgattttcatcccttacctctctgtgttattcgcggatcaatcaattgcgcttgtcatcagttctcttgccgaatgcagccggatataagcaacccacgccgccagcaacgtgaatgccccggcaaacaggaagcaggccgcatagccaaaatgttgagcaacaacgccaccgataacgcctgccagaatggcgattgccgcatcagtacattgaaagagggtgaagtcgacaccggcctgcaaaggcgatgaaagcgacatcagcgtggcgtaaagacagaccagcgcgcaggccagcgaaatggactggacaatgaccagacactggagaatctgcagcagcagatgacccggcgccatcatgagcgtcatcaccaccgccagcagcgcgatcccctggacgccataagccgtcaacagcgctctgccgggtgaggtgtatttcatcagcaatccgccagccagcgttcctgctatgcccgctgcaatattgccgccgctgaacagcgcgcccaatgcggacatgctcaacccatgatccaacaacagcggtgccagaagaggcagcacaaaccgcatgcctgaattcagcatcaataccagcagtaagcccaggcgcgcctgcttcctccttagcgcataacctaacgccggaacatgcgggatagtcgctgttcgcgtcggctccgtaatgcgccacagcgggagtgacagcgccataatcagcaccgccatcatcagcatggcgacaggccagccggatgccgccgacagcatcaggaacaccccgccgccgcacatcattcccagatagctgccgccgacctgcacgctgtttccccagccgtaacccgtgcgggtcagttgatcgacacaaaagccgtcgctggcgatatcaatggtggaggcgaccgtgcctgccaccataaacagaacaaataacgcgacgatttgcgtatcggggaatcccccttctcgcccaaaccagccaatcgctgcggcaatagtcaggatcgccgctagcgcgacctgaccacgcaggattaacatgcgggaacggcgttcctggctaccgggcggaagccgccagcgctcgatccacggcgcccaaataaacttcagcgcccagggcagcataaacagggttgtcgcaccggcaagcgccagcgaaccgccagcagcgcgcaccagcgcgggtaaggactgcatagacagcgccgataccagactctgcgtcacatagacgccggcaatagcaaaaatcacccgcccggtcgtcaacgtcagcggtttcacattcgactgaacatcactcatgcacccactctccagacgcggaacccccgtcgtcgcgccacacgcgcgcggccatttgcgcctgccacagcgcctgataacgcccatgatgtgagagcaattgcgcatgagtaccctgctcaaccacctgtccctcttccatcaccagaatgtttccggccccggcgatggtggataaacggtgagcgatgataatcaccgtccggttgtaaaccaggttatcgatcgctttttgcaccgccagctcgctttcaatatccagcgcggcagtcggttcatcgagaatgacgaccggcgcgtttttcaataacgctctggcaatggaaatccgctggcgctcgccgcccgatagctggccgcccatctctcccattggcgtcagccagccttgcggaagacgggaaataaactcaaggcactgcgccgcgcgggcggcctcttctacctcctgccgcgtcgcctgtgggcgcgcgatacggatattcgccagcagcgtgtcatcaaacagccagacatcctggaaaacaacagaaatcaggctattgagctgttccggcgtcaggcggcgaatatcgacgccgccaatagaaatctgcccttgctgcggatcggcatagcgcattaacagtttggtgaccgtagttttgcctgcgccggaggcacccaccagcgcgctcatactggctgccgggaacgtcaaagaaacatgattaagcgcgtggccgtcaccttcttcgtagcgatagctgacgttgtcaaagcggatatcgtaacgttccggcatctcgctttgctctgcgacgggaagcggtgctatcgccataaactgctcaatccgttgcagggcgctggcgatcagttccacaaccgaggtgtagctgataaacatcgccatcggttctgcgaagcgcataatcatcgcgacggcggcaatcaaaaaggcgaggttcagagtgcccgtcactacccagacgatcccggataacaccaccacctgtaggcccaactccacgacgctggcgatcagcatcgtcgcgccagcgccctgacggtgagtgcgggtctgtaagttttccagcgcattgaaatgcgccagcagcgcccggcttttatcggcatcgctgccgcaggtgcgcaataccatcatcccctgagcaaattcaacgatatcgccgctcagacgctggtgcgcttcccccagcgtctgcatttgtcgccgcatcgccgggcggcgccagtaataaaacggcaccagcagagggaagatcagcaacatcaccagccccagccgccagtctatccacaatgtcgccagcgacgccgtcagcggcgtgacaatggtgagcagcaaaatattggctatcgcaataacataattgaggttttcatccacgctgcccagcagcaaggcgttcatttcacccgccctgccgcgctggagcttctccagcggcacgcggcgtaactgctcgccaagtcgcaggcgcaactcatgggtagcctgcgccagatgaccacggtattcaaagcccaggccataccagcgtagcaccagcgtcacaattgcggcgacgctgaaggccatagcccagttaagaagttgcggcgcgtctccccgtaacagcgcatcaatgatcggataaagacaggcaaaggcgatcccctgcatgaatgccgccagcaacagcgccagcatactgcgtcgcagcatcctggcctgactgccaacgctggagataagctggcgccagatgacgcgccaggccaggttatccgcaggattattgtctttcattttccaccacctcttcctgtgttccacccggcacccaatgctgcgcctgctgatagtgttgccagagccgttgatacaggccgccctgcgccaacagttgcgtatggttccccatttccctgagctgtccgtcggaaaacagcaatatcacatcggcctgagtcaccattgagagacgatgcgcgaccatgatgaccgtccggccacgcatggccgccgcgagcgccttgataagcgccgcttcgttttccgggtcagcaaacgccgtcgcctcatcgagcaccaggatggggcgatcctgcaaaagcgcccgggcgatagtaatgcgctgccgctggccgccggagagaaataccccacgttccccgactcgagtgttgtaaccttctggcagagcgctaataaaatcatgggcctgcgccactctggccgccgctataaccgcctccagcggcgtatccggcgcgcccagacgaatgttattggctatcgtgtcggcaaaaaggaagttgtcctgaaacacaaacgagagttgcttcatcagggtgtccgtctgcatatcacgcagatccacgccgccaatacggatatggcctttgtccgggtcggcgtaacgcagcagcaagcgcgccacggtgctttttccggcgccgcttggcccgaccagcgccacaatttgcccggcaggcacatgaaagctcacctcctgcaacgcggcgccagtacgcgcttgcggataatgaaagctcacctgctcaaaggtaatgctcgcctcttgcggctgctggtcagactgcggcagcgataactccggcatcgcgagaacctgataaatacgctgaatgcttaaacgcgtttgcgcgaccaggttattgagcatcatcattggcattacggcttcggccattccgctgcccagcagtaaaacggccacccacgcgataaaatcgaaactgccatagtgcaacaggccgtatcccgaccagatcaggacaaacagggtcgggagaggattcagaatcgagaaggaaaaacgcgctgaaaaaccggctttgcgataccaggttttgagcacatcgacccactcttcaagggcgcgttgatagcgcaaaaaactggtgctgccgctatcaaacgttctcaccacgggcatggcctgcacgaactcaataaccgccgcgctaacctgctcgcgcgccttatgataacgctgagccatatcttccgaacgctggcgggcgagcacgagaacaaccgatccaaacgccagtacccccagcgtcgcgattgccagccgccagtccagccagaacaagataacgattgtcgccagcggcatgatgatcgcgcgggcatagagcggcgtgctgtcggccacaaaaatatgtaacgacttcacgtcatccagcatcactttcgccactgacccgctgcccatttgctgtaacacgccaggcggaagctgcaatgctttacgggctaacctgctgcgcagaatgttctccagatgaaaagccgcgtaatgagaggtgttgaacgcctgtaagcgcagaacaaaagttaagaccacgcagccgatcacgccgcccagcggccaggccggaatagcgtcaggcgtcgcgcgaatgtcacgcaggctccacgccagaaaaaggagcgcccccaggctggttaatgccgccagccccgccagcgccatagctaaaataaccttcctgcgaaccggtgtaatcacctgccagagaggaaatcgggacagcgattcagtattggatgattgagatgacatgggagtaactgaatttcctgatgaatttttacggacgccaaaaacgacaattcagggtggcgttctgagaattaatgtgaataataaccattatcaataactcatctaccccattcggttctatttatacccgcattggtctaagccacagggagataaccaggtcatgatggagtcaccgcaaacgcaatctgaaatctctattcaccagttggtggtcgggaaacctgcaaacgatggcaatattcctgctcagtgtgaactgctgcgctgttcgttgcaggaaggtatggatattttgctctggaggggccattttgcgcggcctgagacgttgcagctacacgacgatctgggcaggattaacttctcgtgcatcctggaaggcacatcgcgctttgcgattcagggactccggcgccacaccgactgggagcttgcgcgcaatcgccattacattacccatacgccagactgtcgcggcagcgcctcctattgtggccgattcgagagcattaccctctccttcagccctgaaaccctcgcgctgtgggtgccggatattagcgcggtcattaagaataagatcgactcccactgctgttgccagcagcagcgttgtaatgctgaaacccacttaacggctcaggccttgcgtcacgcgctgatgcgcatgcacggcggcttcagtcatgaacaaaagccgtcgacgctatggttgcaggggcaaagtctggtcatgctcagtctggtgctggatgaacatcgcgaagacgccagttgcctctcctgccacttcaacccgatggaacgccagaaactgctgcgggcgaaggatctgctgctggctgatctgacgcaagcgccgggcgtcgcggagttggccagagagtccggtctgagcgttctcaaaattaagcgaggcttccgcgttctgttcaacaacagcgtctatggcctgtttcaggctgaacgaatgcaggaagccagaagacgcctggccaacggcaatacctccgtcatgacggtggcggccgatctgggctatgccaacgccagccatttctctgccgccttccagaaacagtttggcgtaactccttcgacctttaaacgcgggatgtaaccggggtcgcgcccccctaaactcctccctgacagaggcccggataccccatccgggcctctgttctttccgcctgttaccaacccgaaacgggcataaataaacccgtttcgggtagcatccaattgttaataattattattctcatatgagtaatgcttttcggtaagacgtgccatcaggaggaagaatgatttctggcgcaccatctcaggattcgctgttaccggacaaccgccacgcggctgattaccaacaattacgcgagcggctcatacaggaactgaatttaacgccgcagcagttacatgaagagagcaacctgatccaggccggcctggattccataagattgatgagatggttacactggtttcgtaaaaatggctaccgccttacccttcgcgagctgtatgccgcccccacgctggcggcatggaaccagttaatgctcagccggtcgccggagaacgcggaagaagaaacgccgcccgacgaatcatcctggccgaacatgaccgaaagtacccccttcccattgacgccagtacagcacgcctacctgacgggccgcatgccggggcagacgcttggcggcgtgggttgccacctgtatcaggagtttgaaggccattgtctgacggcgtcgcagctggagcaggccatcacgaccttgctgcaacgccacccaatgctgcatatcgcctttcgccccgacgggcagcaggtctggctaccgcaaccttactggaacggcgtcaccgttcatgatttacgccataacgacgctgaaagccgccaggcctatctggacgcactgcgccagcgcctgagccaccgtcttttacgcgtggaaatcggcgaaacgtttgattttcagctgacgctcttgccggacaatcgccaccgcctccatgtcaatattgacctgctgattatggatgcctccagctttacgcttttcttcgatgagcttaacgccctgctggccggagaatcgctgccggctatcgacacccgctatgatttccgctcgtatttgctgcaccaacagaagatcaatcaaccactgagagacgacgcgcgcgcttactggctggcgaaagcatcgacgcttccccccgcgcccgtcttgccgctggcctgcgaacccgccacgctatgtgaagtccgtaatacccgacgccgcatgattgttccggcaacacgctggcacgcctttagcaaccgggccggcgagtatggcgtgacgccgacaatggcgctggcgacctgtttttctgccgtgctggctcgctggggcggcctgacgcgtctgctgcttaacatcaccttattcgaccgccagccgctgcacccggcggttggcgcgatgcttgccgacttcaccaatattcttctgctggacaccgcctgcgatggcgataccgtcagcaacctggcgcgtaaaaaccagctcacgtttacggaggactgggagcatcgccactggtccggcgtcgaattactccgtgaactcaaacgccagcagcgctacccccacggcgccccggtggtatttaccagcaatctggggcgttccctctacagcagccgcgcagaatcgccgttgggcgagccggaatggggcatctcgcaaacgccgcaggtctggatagatcatctggcgttcgagcatcacggcgaggtctggctacaatgggacagcaacgacgcgctgttccctccggcgttagtcgaaacattgttcgacgcctactgccagttgattaaccaactctgcgatgacgaaagcgcctggcaaaagccgttcgcagatatgatgcccgccagccagcgcgcgatacgcgaacgggtcaacgccaccggtgcccccattcccgaaggcttgctgcatgaaggcattttccgtatcgctctgcaacagccgcaggcgctggcggtaacggacatgcgttatcagtggaattatcatgagctgacagactatgcccgccgttgcgcgggcaggttaatcgagtgcggggttcagcccggcgataatgtggctatcacgatgtcgaaaggcgcaggacaacttgttgcggttctggccgtcctgctggccggggcggtttacgttccggtttcgctggatcagcctgccgcacggcgcgagaaaatctacgctgacgccagcgtccggctggtgctcatttgtcagcacgacgccagcgccgggtcagacgatattcccgcccttgcctggcagcaggccattgaggcggagccgatcgccaacccggtagtacgcgcccccacgcaaccggcctacattatctacacctccggctctaccggtacgccgaaaggggtagtcatttctcaccggggagcgcttaacacctgttgcgatatcaatacccgctatcaggttggcccgcatgacagggtgctggccctctccgccctacattttgatttatcggtttacgacatttttggcgtactgcgcgcgggcggcgcgctggtgatggtgatggaaaatcaacggcgcgatcctcacgcatggtgtgagctgatccagcgccatcaggtcacgctctggaacagcgtcccggcgctgttcgatatgctgctgacctggtgtgaaggtttcgccgacgccacgccggaaaacctgcgcgcagtgatgctttccggcgactggatcgggcttgacctccccgcccgttatcgggccttccggccacaaggacaatttatcgcgatgggcggcgccaccgaggcgtctatctggtctaacgcctgcgaaattcacgacgtccccgcccactggcgctccatcccttacggttttccgctaaccaaccaacgctaccgggtggtggatgaacagggccgggactgccctgactgggtgccgggtgaattatggattggcggcattggggtcgcggaaggctatttcaacgatcccctgcgtagcgagcagcaatttttgacgctcccggacgagcgctggtatcgcaccggcgatctcggctgctactggccagatggcacaatcgagttcctcggtcgtcgcgacaagcaggtcaaagtcggaggatatcgcatcgagctgggcgaaatcgaaagcgcgctcagccagctggcgggggtgaaacaagcaaccgttctggcgatcggcgaaaaagaaaaaacgctggcggcatacgttgttcctcagggcgaggctttttgcgttaccgatcatcggaacccggcactgccgcaggcgtggcacacgcttgcgggaacgttgccctgttgcgccatctcgccagagatctccgcagaacaggtagccgatttccttcagcatcgcctgctaaaactgaagccgggtcacaccgctggcgccgatcctctccccctgatgaactcactcgctatccagccgcgctggcaggccgtggtggaacgctggttagcatttctggtgacacaacggcgactgaagcccgctgctgaaggttatcaggtctgcgctggtgaagaacgcgaggatgagcacccgcacttcagcggacatgatttaacgttatcgcaaattcttcgcggtgcccgtaacgaactgtcgttactgaacgacgcgcagtggtccccggaaagcctggcctttaaccatccggccagcgccccgtatattcaggaactggcgacaatttgccaacagcttgcacagcgcttacagcgcccggtacgcctgcttgaggtgggaacccgcactggccgcgccgcagaatcgctgttagcacagctcaacgccggacagattgagtatgtcgggcttgagcagagccaggagatgctgctgagcgcccggcagaggctcgccccctggcctggcgcccgtctgtccctctggaatgcagacacgctggcggcgcacgctcactcggcggacattatctggcttaataacgccctgcatcgtctgctgccggaagatcccgggctccttgcgacattacaacagcttgccgttcccggcgcgctgctctacgtgatggagtttcgccagttaacgccgtccgccctactcagcacgctcctgttaaccaatgggcagccggaggccttgctgcataacagcgccgactgggcggcattatttagcgcggccggcttcaactgtcagcatggcgatgaggtcgcggggttacaacgcttcctcgtacaatgtcctgacaggcaggtgcgccgcgatccccgtcaacttcaggccgccctcgccgggcgtctgccggggtggatggtgccgcaacggatcgtcttcctcgacgccttaccgctgacggctaacgggaaaattgactaccaggcgctgaagcgtcgtcatacccctgaagcggaaaacccggccgaagcggatttaccccagggcgacattgaaaatatcaccaaactgctcgtaaggcatcagactgcttttccctttcagatatcccataaagcctgatacgctcattttgggcgggatctccacaagcatatggatatgatctgccagcattcagcttccagaatccgtacacttttccactcacacagctttctcaaaatacagcctattgctctacgcttctctctgtagaacacctgtcttcggtattttggcgcaaatactatgaaaaacaggttgccgccctctggcagcaactcttatcaactggcaatgtcaccagagaaaccgacttcttccagcaaggcggcgatagcctgctggcgacccgtctgaccgggcaacttcatcaggcaggttatgaagcgcaattaagcgacctgtttaatcatccccggctggcggattttgccgccacgctgcggaaaaccgacgtcccggtcgaacaaccattcgtccactcccctgaagatcgctaccagccctttgcgcttaccgacgtgcagcaggcttacctggtggggcgtcagccgggctttgccctgggcggcgtcggctcacatttctttgttgaatttgaaattgccgatctggatctcacccggttggagacggtctggaaccgattaatcgcccgccacgatatgctacgcgccgtcgtgcgtgatggacagcaacaggtgctcgaacagacgcctcgctgggtaatacccgcacacatcctccatacgcctgaagaggcgttgcaggtgcgcgaaaaactggcccatcaggtactcaaccccgaagtctggccggtattcgatctccaggtcggttacgttgacgggatgcccgcccgcctgtggctgtgtctggataacctgttacttgacgggctgagcatgcagattctgttggcggagctggaacatggctaccaatatccgcaacagttgcctccgccgctacccgtcacctacagggattacctgcaacaacccgcgatccagtcgcttaacgcagattctctggcatggtggcaggcgcaacttgatgatattcctccggctcctgcattgccgctacgttgcatgcctcaggacgtcgaaacaccgcgcttcgcccgcctgaacggcgcgctggacagcacgcgctggcatcggctgaaaaaacgggcggctgacgcccatctcaccccgtcggccgtactgttgtcggtgtggtcaacggttctctctgcatggagtgcacagcctgagttcacgcttaaccttacgcttttcgacaggcgaccgctgcacccgcaaatcaaccagattctgggcgatttcacctcgctgatgctgctgagctggcatcccggcgaaagctggctgcacagcgcgcagtcactacagcagcggctgagccagaacctcaaccaccgcgatgtgtcagccatccgcgtgatgcgtcaactggcgcaacggcaaaacgtgcctgccgttccgatgcccgtcgtctttaccagcgcgctgggctttgagcaggataacttcctcgcccggcgtaatctgctcaaaccggtctggggcatctcccagacgccgcaggtctggctcgatcaccaggtttatgaatccgaaggcgaactgcgctttaactgggattttgtcgccgcgctgtttcctgccgggcaggtggaacgtcagtttgagcagtattgcaccttgctaaaccgaatgaccgaggatgaaaacagctggcatttgccactcgccgcgctggtgcctcccgttaagcaggcggagcaaggtacagagcgcacatcgcgcgtatgccctgagcactctcagtcacacattgcggcggacgagagcaccgtcagcctgatttgcgacgccttccgcgaggtggttggcgagtctgtcacgcccgcacaaaacttctttgaggcgggcgcaacgtcgctgaatctggtgcaactgcacgttttgttacaacgtcacgaattttcgactctgacgttacttgacctctttacccacccttctcctgcagccctggccgcttatctgaccagtgtcgccacggtggagaaaaccaaacgctctcgccctgttcgccgtcgtcagcggcggatatagcgcgaagcaaactgattttccccggaacgccatcgcgaacgcatggcgttccattgactttatgaaccttaggaaatgggaccgattatggataacttgcgcttctcttctgcgccaacagcagattccattgatgcatcgatcgttcaacactacccggactgcgaacctgtcgcggttatcggctacgcctgccattttcctgaatcgccggatggcgaaacgttctggcaaaatctgctggaaggtcgtgaatgcagccgacgctttacgcgcgaagagcttctggccgtcggtctggatgccgccatcattgacgatcctcattatgtcaatatcggtacggtgttagacaacgccgactgcttcgacgccaccctgtttggctattcgcgacaggaagcggagtcgatggacccgcagcagcgcctgtttttgcaggcggtctggcatgcgctggaacatgccggttatgcccccggcgccgtcccccataagaccggcgttttcgcctcttcccggatgagtacctaccccggtcgcgaagcattgaacgtgacagaagtcgcgcaggtaaaaggtctgcaatctctgatgggcaatgataaagactatattgccacccgcgccgcgtacaaactcaacctgcacggcccggcgttatcggtacagaccgcctgctccagctcgctggttgccgtgcatctggcctgtgaaagcctgcgcgctggcgaatccgatatggcggttgccggcggcgtggcgctctctttcccccagcaggcaggctaccgctaccagcccggaatgattttctctcctgatggtcactgtcgtccctttgacgcctcggctgagggcacctgggccggtaacggtctcggctgcgtggtgctgcgtcgcctgagagacgcgctgctgtcaggcgatccgattatctcggtgatcctctccagcgcggtcaacaacgacggcaacagaaaggtcggctataccgccccttccgtcgcagggcaacaggcagtcatcgaagaggcgttaatgctggcggccatcgacgacaggcaggtaggttacattgaaacccacggcaccggcacaccgctgggcgacgcgattgaaattgaagcgttacgcaacgtctatgcgcctcgcccgcaggatcagcgctgtgcgctcggttccgtgaaaagtaacatgggccatctggataccgcggcgggcattgccggactgctgaaaaccgttctggcagtcagtcgcgggcaaattcctcccttactgaattttcacacccccaacccggcgctgaaacttgaagagagcccctttaccataccggtgtcggcacaggcatggcaggacgaaatgcgctatgcgggcgtctcctcctttggtattggcggcaccaactgccatatgatcgtcgcctcgctgcccgacgcgctcaacgcgcgcctccccaatacggatagcggcagaaaaagtaccgcgctgctgctcagcgccgccagcgacagcgcgttgcggcggctggcgacggattatgccggggcgctgagagagaatgcggatgccagctctctggccttcacagccctgcacgcgcgccgtctcgatctccccttccgcctggcggcgccattaaaccgtgaaaccgccgaggcgctcagcgcctgggccggtgagaaatcgggggcgcaggtttacagcggccacggcgccagcggcaagcaggtgtggctgtttaccggccagggctcgcactggcgcactatgggtcaaacgatgtaccagcactcaacggcgtttgccgacacgctggatcgctgtttttccgcctgtagcgaaatgctcacgccgtcactgcgcgaagcgatgtttaaccccgattcggcgcagctggacaatatggcctgggcgcagccggcgattgtcgcgtttgaaatcgcgatggcggcgcactggcgtgctgaaggactgaagccagacttcgccattgggcattccgtcggtgaatttgccgctgccgttgtctgcggacactatacgattgaacaggtcatgccactggtttgtcggcgcggcgcgctaatgcagcagtgcgcaagcggcgcgatggtggcggtatttgcagacgaagacacgctgatgccgctggctcgccagtttgagctggatctcgccgccaacaacggtacgcaacatacggtattttccgggccggaagcccgtctccgcggtattttgcgccacgctctcgcagcatgacattaactatcgtcgcctgagcgtaaccggtgcggcgcactccgctttactggagccgatactcgatcggttccaggacgcctgcgcgggactgcacgcggagccggggcaaataccgattatttccacgctcaccgccgacgtcattgatgagtcaacgctcaaccaggcggattactggcgccgacacatgcgccagccggtgcgttttatccagagtattcaggtggcgcatcaactcggcacccgcgtttttctggagatggggcccgatgcccagttggttgcttgcgggcagcgcgaataccgcgataacgcatactggatagccagcgcccggcgtaacaaagaggcgagcgttgtcctcaatcaggccctgctccagctttacgctgccggcgtcgctctaccgtgggccgacctactggcgggcgatggacaacgtatcgctgcgccatgttatccgtttgatactgagcgttactggaaagagcgcgtctccccggcctgcgagcctgccgacgcagcgctgtctgccgggctggaggtggcgagtcgcgccgcgacagcgctcgatctccctcgcctggaagcgcttaaacagtgcgccacgcgactgcacgccatctacgtcgatcaactggtacaacgctgtaccggcgatgccattgagaacggcgtggacgccatgaccatcatgcgccgtggacgtctgctgccccgctaccagcagctactccagcgcctgctgaataactgcgtggtcgacggcgattaccgctgcaccgacgggcgatacgtccgcgcccgccccattgaacatcaacagcgggaatcactgctgacggaacttgccggttattgtgaaggttttcaggctattcccgacaccatcgcccgtgccggcgatcggttatatgaaatgatgagcggcgcggaagaaccggtggcgattatcttcccgcaaagcgcctccgacggcgtggaagtgctgtatcaggaattcagctttggccgctatttcaaccaaatcgccgccggggtattacgtggcattgtccagacgcgtcagccccgccagccgttgcgtattcttgaagttggcggcggaaccggcggcaccaccgcgtggctgctgccggaactcaacggcgttccggcactggagtaccatttcaccgatatctcggcgctgttcacccgtcgcgcccagcagaaattcgccgactatgattttgtgaagtatagcgagctggatctcgaaaaagaggcgcagtctcagggtttccaggcacagtcttacgatcttatcgtggcagcgaacgtgattcacgccacccgccatattggccgcacgctcgataatctgcgccccctgctcaagccgggcgggcgcctgctgatgcgcgaaatcacccagccaatgcgtctgtttgacttcgttttcggcccgctggttcttccgctacaggatctcgacgcccgcgaaggtgagttattcctcaccaccgctcagtggcaacaacagtgccgccacgccggattcagcaaagtggcgtggctaccgcaggatggcagcccgaccgccgggatgagcgaacatatcattctcgccacgctgcccggtcaggcggttagcgccgtaacattcaccgcgccatcagaacccgtgttggggcaggcgctgacggataacggtgattatctcgccgactggtctgattgcgcaggtcagcccgaacggtttaacgcccgctggcaggaggcctggcgtctgctttcacagcgtcatggcgacgctctgcctgtggaaccgccccccgtcgccgccccggagtggctagggaaggttcgcttaagctggcaaaacgaagccttttcccgcggtcagatgcgcgttgaagcccgtcatcctgctggcgagtggctgccgctatcgcccgccgagcctcttcctgcgccgcaaacgcattatcaatggcgctggacgcccctcaacgtcgccagcattgaccatccgcttacctttagcttcagcgccggtacgcttgcgcgcagcgacgagctggcgcaatacggcatcattcacgatccgcacgcctcttcacgactgatgattgttgaggagagcgaggatacgctggccttagcggagaaagtgatagcagcgctcaccgccagcgcagccggattgattgtggttactcgccgcgcgtggcgagtcgaggaaaatgaagcactctctgcatcccatcacgcgctatgggccttgcttcgcgtcgcggccaacgaacagccggaacggttgcttgccgccatcgatctcgccgaaaacaccccgtgggaaacgctgcatcaagggttgagcgcagtctcactatcacagcgctggctcgccgcacggggtgacaccctttggcttccttcactgtcgcccaatacgggatgcgccgctgaattaccggcaaacgtgtttaccggcgatagccgctggcatctggtgaccggagcgtttggcggattaggccgccttgccgtgaactggctcagagaaaaaggggcgcgacgcatcgccctgctagcgccgcgcgtggatgagtcatggctacgcgacgtggagggcgggcagacgcgcgtctgccgttgtgatgtgggcgatgccgggcaactggccacggttcttgacgatctggcggccaacggcggcattgccggagcgattcatgccgctggcgtattggctgacgcgcccttgcaggagcttgatgaccaccagctggctgccgttttcgcggtaaaagcgcaggcggcaagccagctgttgcaaaccctgcgcaaccacgacggacgctatcttattctctactcttccgctgccgccaccctcggcgcgccgggtcagagcgcccatgcgctggcctgcggctacctggacgggctggcccagcagttttccacccttgatgcgccgaaaacgctctctgtcgcctggggcgcatggggagaaagcggtcgggcggccacgccggaaatgctggcgacgctcgccagccgaggtatgggcgcgttaagcgatgccgaaggctgctggcacctggaacaggcggtgatgcgcggtgccccgtggcgactggcgatgcgcgtttttaccgacaaaatgcccccgttacaacaggctctgtttaacatcagcgccacagaaaaagccgcaacgccggtcattcctcctgctgatgacaacgcctttaacggcagcctgagcgatgaaacagcggtgatggcatggctgaaaaagcggattgcggttcagctaaggctgagcgatccggcgtcactgcatccaaaccaggatctgttgcaactcggcatggactcgctgctcttccttgaactcagtagcgatattcagcactacctgggcgtacgcatcaatgcggaacgggcgtggcaggatctgtctcctcatggactcacgcagcttatctgttctaagccagaggcgacgcctgccgcttcgcagccggaagtgttgcggcacgacgccgacgagcgttatgcgcccttccctttgacgcccattcagcacgcctactggctggggcgaacccacctcattggctatggcggcgtcgcctgtcacgtcctgtttgagtgggataaacgccacgatgagttcgatctcgccatactggagaaagcatggaaccagctcatcgcacgccacgatatgttgcgtatggtggttgatgccgacgggcagcagcgaatcctggcgacaacgccggagtatcacatcccgcgtgacgatctgcgcgcgctttccccggaagaacagcgcatcgcgctggaaaaacggcggcatgaactgagctatcgcgttttgcctgccgaccagtggcctctttttgagctggtggtcagcgaaatcgacgattgccattaccgtctgcatatgaacctcgaccttttgcagtttgatgtgcagagttttaaagtcatgatggacgacctggcgcaggtctggcgcggtgaaacgctggcgccgctcgctattaccttccgtgattatgtgatggctgaacaggcgcgccgacagacatcggcatggcacgatgcctgggattactggcaggaaaaactgccgcaactgcccttagcgccagagctgccggtggttgagacgcccccggaaacgccacacttcaccaccttcaaatcgacgatcggcaagacagaatggcaggccgtgaaacagcgctggcagcagcaaggcgtcacaccgtctgccgcgctgctcacgctgtttgccgccacccttgagcgctggagccgtaccacaacatttacgctgaacctgacgttcttcaatcgccagccgatccatccgcaaatcaaccagttgattggtgattttacctccgtcacgctggttgattttaacttctcagcgccggtgacgttgcaagagcagatgcaacagacccaacagcgcctctggcaaaacatggcgcacagtgaaatgaacggtgttgaggtgatccgtgagctgggccgcctgcgcggatcacaacgtcaaccgctgatgccggtagtgtttaccagtatgctggggatgacgctggaaggcatgactatcgatcaggcgatgagccatctgttcggcgaaccctgctatgtattcacgcaaacgccgcaggtctggctggatcatcaggtcatggagagcgacggcgagttgatgtttagctggtactgcatggacaacgtgctggaacccggcgctgccgaggcgatgtttaatgactattgcgccatcctgcaagccgtcatcgccgcccctgaaagcctgaagactctcgccagcggcatcgccgggcacattccccgccgacgctggccgctgaacgcgcaggcggactacgacctgcgggatattgagcaggcgacgctcgaataccccggcatccggcaggccagagcggaaataaccgaacagggcgcgttgacgctggatatcgtgatggccgacgatccgtcgccatcagcggcgatgcctgatgagcacgaacttacccaactggcgctgccgttgcctgagcaggcgcagcttgatgagctggaggcgacctggcgctggctggaggcgcgtgcgctacaggggatcgcggctacgctaaatcgtcacggcctgtttaccacgccggagatcgcccatcgctttagcgcaatagtacaggcgctgtccgcgcaagcgtctcaccagcgtctgctgcgccagtggctacagtgtctgacggaaagagagtggttaatccgcgaaggtgaaagctggcgctgccgcattccgctcagcgagattcctgagcctcaggaagcgtgcccgcaaagccaatggagccaggcgctggcgcagtatctggaaacctgcatcgcccggcacgacgccctcttctccgggcagtgttctccgctggaattgctgttcaacgagcagcatcgcgttaccgacgcgctgtatcgcgacaaccccgccagcgcctgtctgaatcgctataccgcgcagattgccgccttgtgcagcgcagaacggattctggaggttggcgccggaaccgcagccactaccgcgccggtgctgaaggccacgcggaacacgcggcagtcgtaccacttcacggacgtctccgcgcagttcctcaatgacgccagagcccgtttccatgatgaatcgcaggtgtcttatgccttgttcgacatcaaccagccgctggatttcaccgcccacccggaggcgggttacgacctgatcgttgccgtcaatgtgctccacgacgccagccatgtcgtccagacgttgcgcagattaaaactgttgctgaaagccggcggacgtttgctgatcgttgaagcgacggagcgaaacagcgtattccagctggcgagcgtgggctttattgagggattaagcggataccgcgatttccgccgccgggatgagaaaccgatgctcacccgctccgcatggcaggaggttctcgttcaggccgggtttgcaaacgagctggcgtggcccgcgcaggaatcgtcgccgctgcgccagcatctgctggtagcgcgttcgcctggcgtaaatcgcccggataaaaaagccgtgagccgctatttacagcagcgctttggcaccggtctgcccattttacagatccggcaaagagaagcgttatttacgccgctgcatgccccgtctgatgcgccgactgagccagccaaacccacgccagttgccggggggaatccggcgctggaaaaacaggtggctgaactctggcaatcgctgctgtctcgccccgtggcaaggcatcacgactttttcgaactgggcggcgacagcctgatggcgacaaggatggtcgcgcagctaaaccggagagggattgccagggctaaccttcaggatctgttcagccattcgacgctgagcgacttctgcgcccatctacaggcggctacgtcaggagaggacaacccgatacccctttgccagggcgacggtgaggaaaccctgtttgtcttccacgcttcagacggcgatatcagcgcctggctgccgctcgctagcgcgttgaacaggcgcgttttcggcctgcaagcaaaatcgccgcagcgctttgccacgctcgaccagatgatcgatgagtatgtcgggtgcatccgtcgtcagcagcctcacggcccttatgtgctggcgggttggtcgtatggcgcgtttcttgcggcgggcgccgcacagcgcctgtacgccaaaggcgagcaggttcggatggtgttaatcgatcccgtgtgccgacaggatttctgttgcgaaaaccgggcggccctgctgcgcctgttagccgaaggacaaacgcctctggcactgcccgaacatttcgaccagcagacgcccgacagccagcttgccgactttatcagcctcgctaaaacggccggtatggtgtcgcaaaacctgacgctgcaagcggcagaaacgtggctcgacaacatcgcgcatctgctgcgtttactgactgagcatacgccgggcgaaagcgttccggtcccctgtctcatggtgtatgccgccgggagacccgcgcgctggacgccagcagaaaccgagtggcagggctggataaacaacgccgacgacgctgtgattgaagccagccactggcaaatcatgatggaagccccccacgttcaggcttgtgcgcaacacattacgcgctggctttgcgcaacctcaacgcaaccggagaacacgttatgatgccgtccgcctccccaaaacaacgcgtactgattgtgggcgccaaatttggcgaaatgtacctgaatgcctttatgcagcccccggaggggctggaactggtcggcctgctggcgcagggaagcgcccgttcaagagagctggctcatgcgtttggcattccgctgtatacctcgccggaacagataaccaggatgccggatatcgcctgtattgtcgtgcgttcgaccgtcgccggaggaaccggtacgcagcttgccagacactttctgacgcgcggcgtacacgtcattcaggagcatcccctccacccggatgacatcagttccttacaaacgctggcgcaggaacagggctgctgctattgggtaaacacgttttatccgcatacgcgcgcgggacgcacatggcttcgcgatgcgcagcagctgcgtcgctgcctggctaagacgccgccggtagtccacgccaccaccagccgacagttgctctactccactctggatttgttgttgctggctctgggcgttgatgccgccgccgtggagtgcgacgtggttggcagctttagcgattttcactgtctgagactcttctggccggagggagaagcctgcctgctgcttcagcgctatctcgatcctgacgatccagatatgcatagccttatcatgcaccgcctgctgctgggctggccggaaggtcatctttcgctggaggcgagctacggccccgtcatctggtcatccagcctgtttgtcgcagaccatcaggagaacgcccacagcctctaccgcagaccggagatcctgcgcgatctgccgggtctgacgcgcagcgcggcgcccctgagctggcgcgactgctgcgaaaccgccgggccggagggcgtcagctggttgctacaccagttgcgcagccatctggcgggcgaacatccaccagcggcctgccaaagcgtacatcagatcgcgttatcacgtttatggcagcagattttacgtaagaccggcaatgcggagatcagacgcctgacgccgccgcaccacgaccggttagccggtttctacaacgatgatgataaggaggcgctgtgacgcaatctgcaatgtgcatcccgctgtggcccgcccggaacggcaatactgcgcatctggtcatgtgccctttcgctggcggcagcagtagcgcgtttcgccactggcaagctgagcaactggctgattgcgcgctttctctggtgacctggccggggcgcgatcgccttcgccatctggaaccgctcagaagcattacacaactggcggcactgctggcgaacgagctggaagcatccgtatcgcctgacacgccgcttttactcgccgggcacagcatgggggcgcaggtggcgtttgaaacctgccgacttctggagcaacgggggcttgcgccacaaggactgattatttccgggtgccatgccccgcatctgcattctgaacgccagctcagccatcgcgatgatgccgactttatcgctgagctgatagacattggcggatgttctcctgaactgcgggaaaaccaggaattaatgtcgctgtttcttcctcttctgcgcgctgatttttacgccaccgagagctatcactacgactcgcccgacgtctgtccgccgctgcgcacgcctgcgctgttattgtgcggcagccacgatcgcgaagcctcctggcagcaggtcgatgcctggcgtcagtggctgagccacgttacaggcccggtggtgattgacggcgatcatttctatcccattcaacaagcccggtccttttttacgcagattgtccgccattttccccacgcattttctgcaatgaccgcgtggcaaaaacagcccagtacttcagaaaggtgacgcatgaattcttcctttgaatctctgattgaacagtatcccttacccattgccgaacagttgcgccactgggcggcccgttatgcctcgcgaattgccgtcgttgatgcaaaggggtcgttaacctacagcgcgcttgatgcacaagttgacgaacttgccgcaggtctgtcatcactgggtttgcgttcgggggagcatgtaattgtgcagcttcccaacgacaacgcgtttgttaccctgctgttcgccttgttaagactgggcgttatccccgtgctggcgatgccctcgcaacgggcgctggatatcgacgcgctgattgagctggcgcaacccgtcgcttacgttattcacggggaaaaccacgcagagctggcccgacagatggcgcacaaacacgcctgcttgcgtcatgttctggtcgctggagagaccgtgagcgacgattttacgccgctcttctcccttcacggtgagcgacaggcatggccgcagcctgatgtttccgccaccgcgttgttgttgctctcaggcggcacaaccggcacgcccaaactcatcccgcgccgacatgccgactatagctataacttcagcgcttctgctgaactgtgcggcatcagccaacagagcgtgtatctcgccgtcctcccggtggcgcataactttccgctggcctgccccggtattctgggaacgcttgcctgcggcggaaaagtggtgctgaccgacagcgccagctgtgatgaggtgatgcctttaatcgcgcaggaaagagtgactcacgtcgccctggttccggcgctggcgcaattatgggtgcaggccagggagtgggaagacagcgacctttcgtcgctgcgcgtcattcaggcaggcggcgcccggctcgacccgacgcttgctgagcaggttatcgccacctttgactgtaccctgcaacaggttttcggtatggcggaaggcctgctctgttttacccggctggacgatccgcatgccaccattctccacagccaggggcgcccgttgtcccctctggatgaaatccgcatcgttgatcaagacgagaacgacgtcgcgccgggcgaaaccgggcaattgttaacgcgcggcccttataccatttcgggctattaccgcgcccctgcccacaatgcgcaggcctttaccgcgcaagggttttaccgcacaggcgacaatgtcaggctggatgaggtggggaacctgcacgttgagggacgcataaaagagcagatcaaccgcgccggagaaaaaatagccgcggctgaagtggaatcggcactgctgcgtttagcggaagtgcaagattgcgcggtggtcgccgcgccggacacgctgcttggcgagcggatttgcgcgtttatcatcgcgcagcaggtgccaactgactatcagcagttgcgtcaacaactgacccgtatggggctcagcgcgtggaaaattcctgaccaaatcgagtttctggaccactggccgctcaccgccgtcggcaagatagacaaaaaacgcctgacggctctcgccgtcgaccgttatcgccattctgcccaataagcgcaaaccgacccgaaacaggttgaaataaacccgtttcgggtagcaccactattagaaatagttatcattttcaattcaccattgtcggtatttttggcgtttcgccgtcttacagggactcacaacaatgaaaatgacacggctttatcctctggccttggggggattattgctccccgccattgctaatgcccagacttcacagcaagacgaaagcacgctggtggttaccgccagtaaacaatcttcccgctcggcatcagccaacaacgtctcatctactgttgtcagcgcgccggaattaagcgacgccggcgtcaccgccagcgacaaactccccagagtcttgcccgggctcaatattgaaaatagcggcaacatgcttttttcgacgatctcgctacgcggcgtctcttcagcgcaggacttctataaccccgccgtcaccctgtatgtcgatggcgtccctcagctttccaccaacaccatccaggcgcttaccgatgtgcaaagcgtggagttgctgcgaggcccacagggaacgttatatggcaaaagcgctcagggcgggatcatcaacatcgtcacccagcagccggacagcacgccgcgcggctatattgaaggcggcgtcagtagccgcgacagttatcgaagtaagttcaacctgagcggccccattcaggatggcctgctgtacggcagcgtcaccctgttacgccaggttgatgacggcgacatgattaaccccgcgacgggaagcgatgacttaggcggcacccgcgccagcatagggaatgtgaaactgcgtctggcgccggacgatcagccctgggaaatgggctttgccgcctcacgcgaatgtacccgcgccacccaggatgcctatgtgggatggaatgatattaagggccgtaagctgtcgatcagcgatggttcaccagacccgtacatgcggcgctgcactgacagccagaccctgagtgggaaatacaccaccgatgactgggttttcaacctgatcagcgcctggcagcagcagcattattcgcgcaccttcccttccggttcgttaatcgtcaatatgcctcagcgctggaatcaggatgtgcaggagctgcgcgccgcaaccctgggcgatgcgcgtaccgttgatatggtgtttgggctgtaccggcagaacacccgcgagaagttaaattcagcctacgacatgccgacaatgccttatttaagcagtaccggctataccaccgctgaaacgctggccgcatacagtgacctgacctggcatttaaccgatcgttttgatatcggcggcggcgtgcgcttctcgcatgataaatccagtacacaatatcacggcagcatgctcggcaacccgtttggcgaccagggtaagagcaatgacgatcaggtgctcgggcagctatccgcaggctatatgctgaccgatgactggagagtgtatacccgtgtagcccagggatataaaccttccgggtacaacatcgtgcctactgcgggtcttgatgccaaaccgttcgtcgccgagaaatccatcaactatgaacttggcacccgctacgaaaccgctgacgtcacgctgcaagccgcgacgttttatacccacaccaaagacatgcagctttactctggcccggtcgggatgcagacattaagcaatgcgggtaaagccgacgccaccggcgttgagcttgaagcgaagtggcggtttgcgccaggctggtcatgggatatcaatggcaacgtgatccgttccgaattcaccaatgacagtgagttgtatcacggtaaccgggtgccgttcgtaccacgttatggcgcgggaagcagcgtgaacggcgtgattgatacgcgctatggcgcactgatgccccgactggcggttaatctggtcgggccgcattatttcgatggcgacaaccagttgcggcaaggcacctatgccaccctggacagcagcctgggctggcaggcgactgaacggatgaacatttccgtctatgtcgataacctgttcgaccgtcgttaccgtacctatggctacatgaacggcagcagcgccgtcgcgcaggtcaatatgggtcgcaccgtcggtatcaatacgcgaattgatttcttctgattattgtaaaagggataccgaaaaggtatcccttttacaccactagttaaaaccagtaactcagcaaagtcgcaaaaaatattaatccatagtgattatttaaacaatgaaattgcgattaggataaatagatttaactttctcgttcctttctctccttatactaaagaaataatcatatcaaaataaaaattcacaacagtgcaacattaaaaaatacaaccaacaaacaatcctatatacaaggcacatctccagaatataaaagcacagacaaacaacctaaaaaaaaaccatacatataaattattttataggtaaaatagattatatattctcatagctaccacaaactatactagcctgaactatatttattctgctgcaatcaatgcatacataacacaaatatcactcaggtacactactcaaaccacgctgggatttttcctcaagttataatcatcaccccgaaaatcattcggcatttactcattaaatagtcaccccataggcctgtacatgtttactcagaaatatacatccttttctctgtcataaaccctctgattaatcatagataaatacttgtgacaccaatctttttccttaaaggaacgaattgttgtgtagaaggagataatattatgtcaaaaaaatatcagcctttgcttataactcattatatgtcaacatgggtcactataacggaagcagttgagatcactaccaaagccataaaacaaaaaattactcctagcgatatttatcgtcatgccttgagtggcaacatcctactatcggtctatttccagtctcctgtgatacttaagaagatacaaacttttaatggaaaaataaaattcaggcagtttgtgggagacctacttgataaactatgcatgcttgacagggacggttttatttatggtcaaaatttaagactctgtacagaagccagatatatttgtcctgtgcaacaaattatagatacccccctgttacgcaaactcaaccagtttcgtacgtttgttcgtaatgtccgcccgggtgatgaactggatgtcccggcacaagttagtgaaaaaaatttaaccccgccgccgggtaacagcagtggcaaccttgagcaacagatagccagtacttcacagctaattggatctctgctcgccgaagatatgaacagcgagcaagcggcaaacatagcacgtggatgggcctcttctcaggcttcaggggtaatgacagactggttaagccgcttcggtaccgcaagaatcacgctgggcgtggatgaagatttcagcctgaagaactcccgtgacggcaaccctcgaaaatggcgattcgatgcaacaaacagtgaactatgtgccgaacgtcacgaatgctgaaatcacgctggcagcctcgaaggatccggtgattgccgacaataacgatctcacgacactaacagcaccgtcgctgatacagagggcaatgcgatagccaacactgaggtaacatttactctaccggaagatgtgaaggcgaacttcacgctgagcgatggcgacaaagcggttactgatgccgatggcaaagcgaaagtcacgctgaaaggtacaaaagcaggcgctcataccgtgacagcatcgatggttggcggtaagagtgagcagttggtggtgaactttactgcggatacgctcactgcgcaggttaatcttaacgttaccgaggacaatttcatcgccaataacattggaatgaccaggctacaggcaacagtgactgatggaaacggcaacccagtagaaggtataaaagttaatttccgcggaacctccgtcacgctaagcagcaccagcgttgaaacggatgatcaggttttcgctgaaattcttgtgacaagcaccgaggtcggactaaaaacagtttcagcctctctggcagataaacctactgaagtcatctcgcgattactgaatgccaaggtagatgttaattctgcgacgattaccagtcaagagatacctgaaggtcaggtcatggtcgcacaagacatagcagttaaagctcacgttaacgaccagtttggcaacccggtgacgcatcaacccgcgacattcagtgcagcgccatcctcgcaaatgatcatcagccagaatacggtctctactaatacgcagggagtagccgaggtcaccatgacgcctgaaagaaacggctcgtatactgtaaaagcatccctagcgaatggagcttcacttgagaaacaactggaggctattgatgaaaaactgacactcacgtccagtccgcttatcggtgtcaatgctcctaaaggcgctactctgacggcaacgctaacctctgcaaatggcactccagtggagggtcaggtcatcaactttagcgtaacgctagaaggtgcgacgttaagtggcggaaaagtgagaaccaactcttcaggtcaggctccagtcgttctgaccagcaataaagtcggtacatatacggtgactgcatcgttccataacggcgtcacaatacagacacagacaaccgtgaaggttactggcaacccaagcaccgcacatgttgctagctttatcgctgatccgtcgactatcgccgccaccaacagtgatttaagtaccttaaaggcaacggttgaggatggcagtggtaacctgatcgaaggtcccactgtgtacttcgccttaaaaagcggctccaccacattaacgtcattaacagcggtgaccgatcaaaacggaatcgcgacaacaagcgtgaaaggtgagataacggggagcgtcactgtaagcgcagtcacaagcgcaggtggaatgcaaacagtagatatatcgctagtggcaggcccagcagacgcctcgcagtccatccttaagaacaaccagtcatcactgaaaggggactttaccgatagtgctgagctacatcttgttctgcacgatatatcaggcaatccgatcaaagtttcttaagggatagaatttgtgcaatcaggtacaaacgtgccctatatgaaaattagcgcaattgattacagtcaaaatatcaacggtgattacaaagctactgttacaggaggcggagagggtatcgcaacgctgatccccgtattgaatggtgttcatcaggcgggtctgagtaccacgatagaattcattagcgcggaaaccagaccaatgacgggtacagtgtcagtgaatagtgcaaacctaccgacagcttcattcccttcgcagggatttaccggggcgtattatcagttgaataatgacaactttgcaccaggaaaaacggcggctgattattcgttttcaagctcggcctcctgggtaggcgttgatgctactggtaaagtgacattcaaaaatgacggtgatagcaatactgtaataatcacagcgcccccaagatccggtggtgctatttaccaaacagttcctcctgaatcgcgttcggtgtgactatgatcattttcggtgagtattgctttgatccaaaggctggttttctgtgatgattgaccagcctcagagtattgatgacaccaccgttcataacagatcggcattactatgcataagtactgcctcaaattctcgccaaaacactttttaatgcctttgcgaattcatccagacttatattgtcaattttttgcccaacgacgactgactccgaaacatcggccattgcgggccatcgcgttttgtaatcagcataaattgcaacaacaggggtattataggcacttgccatatgtaatattgaggtgtcaggagttattgcaatataagcatcttttatgattgctgctgaacgtttaatcgagggtgataaggataaacggtagacattattataacaatccactaatgccctggctttatcttcccctttgggtccataaacgatcactattggaatatctgtttcactttgaatttttgctattagattttctgcaatcgataatgaaaatgtacgttcctgcgagctaccgtctaaattgagcgcaatgtaagatcctaacgatcgcatttcctcgcgtacctcatcgagtacatcatcgcttaatggcaattcatatattgacctgactgccggaaaacccgcctcacgcatcataaatgcccatgtcatgggtacaggagtccggagattctgatccatccgggacgcgttcttacacaaaggggaatagcacttcatggttaaaccgacgacctggaaattcgtttttgctttcaactgactgataaatatcatcgttttcaggttctttttacgcatcgcctctatacaaagatccggcgtaccgtattgcagtgttatgttcttcgctaaatcttttatttcttttaatgttgcgtgatcctgcatagtcattgtgactaatgttaatttagtctgttcaagtttgagcgcattaaagacttctaaattaattgtcgacgtaacaattaatagatgcttaattttatgcaattcaagcgcccgaataacaggaaagatggccatagcatcgccaatctgatcgggaatatgtatgacaacaaagtctgttttttcaatattaaaattataagctttataatcgtagtaactaaatgcaatacgtctcaacaatgatactaaaaacataactaacctcgcctccctactggttataatgcaatgcagtctatcagaatcatcagggtgcaattttgtgcatatgcggacttttatgtttcatatctcgaacctgtgggccctctgcttaatccttaaacaacaccagcaactcctgcgctttcatcttccatcgaatttttcatgttgccgctaatcagccataaaatcatttgcagatgcgctctgtcgaggtagtctcataaggttcgtttatagatcgacggcaatgtgagttaccttttccatactaattataaaaagacagtacaaacaggatcattatggactccacgctcatctccactcgtcccgatgaagggacgctttcgttaagtcgcgcccgacgagctgcgttaggcagtttcgctggtgccgtcgtcgactggtatgattttttactctatggcattaccgccgcactggtgtttaatcgcgagtttttcccgcaagtaagcccggcgatgggaacgctcgccgcatttgccacctttggtgtcggcttccttttccgaccgctcggcggtgtcattttcggtcactttggtgaccggctgggacgtaagcgcatgttaatgctgaccgtctggatgatgggcatcgcgacagccttgattggtattcttccttcattctcgaccattgggtggtgggcacctattttgctggtgacactgcgtgccattcagggatttgccgtcggcggcgaatggggaggcgcagcgttgctttccgttgaaagtgcgccgaaaaataaaaaagccttttacagtagcggtgtacaagttggctacggagtaggtttactgctttcaaccggactggtttcattgatcagtatgatgacgactgacgaacagtttttaagctggggctggcgcattcctttcctgtttagcatcgtactggtactgggagcattgtgggtgcgcaatggcatggaggagtccgcggaatttgaacaacagcaacataatcaagcggccgcgaaaaaacgcatcccggttatcgaagctctgttacgacatcccggtgcttttctgaagattattgcactacgactgtgcgagttgctgacgatgtacattgttactgcctttgcacttaattattcaacccagaatatggggttaccgcgcgaacttttccttaatattggtttgctggtcggtggattaagctgcctgacaattccctgttttgcctggcttgccgatcgttttggtcggcgcagggtttatatcacaggcgcgttgatcggaacgttgagcgcatttcctttctttatggcgcttgaagcacaatctattttctggatagttttcttctccataatgctggcaaacattgcgcatgacatggtggtgtgtgtgcaacaaccgatgtttaccgaaatgtttggtgccagttatcgctacagtggtgctggagtcggttatcaggttgccagtgtggttggcggtggatttacgccttttattgccgctgcactcatcacttactttgccgggaactggcatagcgtcgctatttatttgctggctggatgcctgatttccgcaatgaccgctttgttgatgaaagacaatcaacgcgcttaatagcctggcgaagatcatccgatcttcgccttacacttttgtttcacattcctgtgacatactatcggatgtgcggtaattgtatggaacaggagacacacatgaataataagggctccggtctgaccccagctcaggcactggataaactcgacgcgctgtatgagcaatctgtagttgctttacgcaacgccattggcaaatatattacaagtggcgaattacctgatgaaaacgcccgcaaacaaggtctttttgtctatccatcactgaccgtaacctgggacggtagcacaactaatccccccaaaacgcgcgcatttggtcgttttactcacgcaggcagttacaccaccacgattactcgccctactctctttcgttcgtatctcaatgaacaacttacgttgctgtatcaggattatggtgcgcatatctctgtgcaaccctcgcagcatgaaatcccttatccttatgtcatcgatggctctgaattaacacttgatcgctcaatgagcgctggtttaactcgctacttcccgacaacagaactggcgcaaatcggcgatgaaactgcagacggcatttatcatccaacggaattctccccgttatcgcattttgatgctcgccgggttgatttttccctcgcacggttgcgccattataccggtacgccagtagaacattttcaaccgttcgtcttgtttaccaactacacacgttatgtggatgaattcgttcgttggggatgcagccagatcctcgatcctgatagtccctacattgccctttcttgtgctggcgggaactggatcactgccgaaaccgaagcgccagaagaagccatttccgaccttgcatggaaaaaacaccagatgccagcatggcatttaattaccgctgatggtcggggtattactctggtgaatattggcgtgggaccgtccaatgctaaaaccatctgcgatcatctggcagtgctacgcccggatgtctggttgatgattggtcactgtggcggattacgtgaaagccaggccattggagattatgtccttgcacacgcttatttacgcgatgaccacgttcttgatgcggttctgccgcccgatattcctattccgagcattgctgaagtgcaacgtgcgctttatgacgctaccaagttagtcagcggcaggcctggtgaggaagtcaaacagcggctgcgtacaggtactgtggtaaccacagatgacaggaactgggagttacgttactcagcttctgcacttcgttttaacttaagccgggccgtagcaattgatatggaaagtgcaaccattgccgcgcaaggatatcgtttccgcgtgccatacgggacactactgtgtgtttcagataaaccgttacatggtgagattaagcttcccggccaggctaaccgtttttatgaaggcgctatttccgaacacctgcaaattggcattcgggcgatcgatttgctgcgcgcagaaggcgaccgactgcattcacgtaaattacgaacctttaatgagccgccgttccgataataagttatgaaccttcttatcagaaatagatgtgaaggattaagtaagacatctggcaaatagcctgcaataaacgcgggctgtttgcttccttgggcagatgcgagttttattatcgtcttaatgatttccacatattaaaagcaagtatgctttcaaaacacaattataaaaaatcccgccaacaacattagtttttataaaattaaatataagattatggctttagaatatttttatttctaatagacgagatttttcctgttatgatataatatgctgaattaacacatgttaacgatttaccagtaatgtaaataaattttcgaggagatcattccagtgggacgtaaatgggccaatattgttgctaaaaaaacggctaaagacggtgcaacgtctaaaatttatgcaaaattcggtgtagaaatctatgctgctgccaaacaaggtgaacccgatccagaattaaacacatctttaaaattcgttattgaacgtgcaaagcaggcacaagttccaaagcacgttattgataaagcaattgataaagccaaaggcggtggagatgaaacgttcgtacagggacgttatgaaggctttggtcctaatggctcaatgattattgctgagacattgacttcaaatgttaaccgtacgattgctaacgttcgcacaattttcaataaaaaaggcggcaatatcggagcggcaggttctgtcagctatatgtttgacaatacgggtgtgattgtatttaaaggaacagaccctgaccatatttttgaaattttgcttgaagctgaagttgatgttcgtgatgtaactgaagaagaaggtaatattgttatttatactgaacctactgaccttcataaaggaatcgcggcgctaaaagcagctggaatcactgagttctcaacaacagaattagaaatgattgctcaatctgaagttgagctttccccagaagatttagaaatctttgaagggcttgttgatgcccttgaagatgacgacgatgtacaaaaagtttatcataacgtcgcaaatctctaattatatgttaaagaaatctgtctttatggcagatttctttaatctcatataatccttataaaaatataatgtttaactcgtcatattgcttataaaaaatccccgttcccagagaaataatatttattaaaatggcaggtcttctttttctgattaccgaagacaaagtggcaattacgtatagtttcccgataaagacgcgacagctacatcccgcataaggcatttttctctttatctttgtacggtacttcatggaacagaatttttgaccttgtgaatcgtgatgtctgttggggaggggcaatttgctcactgaagcgtgagactcgattaagcgcacgaaacacagaaatcaaaaacccgaccacttttttacaaagtgaccgggtaaaaataatttttattttttaactgtcctgagactcatagagatgtctcaaaactaaaatttggctcctctgactggactcgaaccagtgacatacggattaacagtccgccgttctaccgactgaactacagaggaatcgtgtgaacggggcgcatattaatggcagtgcatggtgatgtcaaagggtgaaatgcatttttttgtttgtttgctgacaatttcaacaaagtggtgagctttcaatcttattgggtaatgaaccatcgtggtgcataccccccttttatagggcaggtgaatgcgactgctgataaaaagggccaatgacgaatctatcataatctcttatttgacagttggttagcttgcgcatcaacgctaaaatagaactggcaagcatcttgcattctggttgtaagtaatggcggcacttgggccgattcttaaaaaccggaggcaacatgaacttcagacgcctgaaatacttcgtaaaaattgtagatattggtagcctgacccaggctgctgaagtattgcatattgcacaaccagcgctcagccagcaggttgccacactggaaggtgagttaaatcaacagcttttgattcgcacaaaacggggcgttacgccaacaggcgccggaaaaattctctatacccatgcacgggccattttacgtcagtgtgagcaggcccaactggcggtgcataacgttggtcagtcattatcggggcaagtctcgattggctttgcgccaggaaccgctgcgtcatccatcaccatgcccttattacaggcggttcgcgctgaattcccggaggtcgttatctatcttcatgaaaatagtggtgcagtgcttaacgaaaaactgataaatcaccaactcgatatggcggtgatttatgagcattcccctgtggctggggtatccagtcaggctttgctgagagaagatcttttcctggtaggaactcaagattgcccggggcaaagcgttgatgttaatgctattgcgcaaatgaacctttttctccccagtgattacagcgctgttagacttcgtgttgatgaggctttttccctacggcggctcacggcaaaagtcattggtgaaattgagtctattgccacgcttaccgcagcgattgccagcggcatgggcgttgcagtattacctgaatcggctgcgcgttcgttatgtggcgcagtaaatgggtggatgtcacgcattaccactccttcaatgagtctctctttgtccttaaatttacccgccagagcaaacttgtcaccacaggcacaggcagtgaaagagttgttaatgtcagtgattagttctccagtgatggaaaaaaggcagtggcaattggtgagctaagcgttatatcgggatggaataagatgcgggtttttattatttgttatgccgggcattagactttaacaataacgggatatctgaactgcccggagtttaccgtgaatttccaacaactaaagataatccgcgaggctgcacgtcaggattacaacctgacagaggttgcgaatatgctttttacctcacagtcaggcgttagccgtcatattcgggaactggaggatgaacttggcatcgaaatatttgttcgacgaggtaagcgactgctgggcatgactgaaccgggcaaagcattactggtcattgcagaacgcattctgaatgaagccagtaatgttcgtcggctcgcagacctgtttaccaacgatacgtctggcgttctcactattgcaacgacgcatactcaggcacgttatagcttgcctgaggtcattaaagcttttcgcgaacttttcccggaggttcggctggagctaatccagggtacaccacaggaaattgcgacgttgttgcaaaatggcgaagctgatattggtatcgccagcgagcgtttgagtaatgacccgcagctcgtcgccttcccgtggtttcgttggcaccatagtttgcttgttccactcgatcatcccttgacgcaaattacaccgttgacgctggaatcaatagcgaagtggccgttaattacttaccgacaggggattacggggcgctcacgcattgatgacgcatttgcccgcaaaggtttgccggcagatattgtattaagtgcacaggattctgatgtcattaaaacctatgttgctcttgggcttgggatcggattagttgccgaacaatccagcggcgaacaagaggaaaagaatttaatccgcctggatacgcggcatcttttcgatgctaatactgtctggttgggactgaagcgagggcaacttcagcgtaactatgtctggcgctttctggaactttgtaatgcaggactgtcagttgaggatatcaagcgccaggtgatggaaaacagtgaagaggaaattgattatcagatatagcaaaaagcccgctataaaagcgggcttttcagaaatttggctcctctgactggactcgaaccagtgacatacggattaacagtccgccgttctaccgactgaactacagaggaatcgctgttgaggcacatcttaacggcgaaaaatattttgtcaaacccgatttttaaatttcccaactgtttgccgtttctatcaacagtttgttgcatttgcagacaatttgttggcgaaaatctttgcagctttgctgattctccctcatcatttgaaatgtggtttcactttctgcaattaaggtcggctttgaatatctcctctgctttacgccaggttgttcacggcactcgctggcactctaaacgcaagagctacaaagtgttgttctggcgcgagataaccccgcttgctgttcctatcttcatggagaacgcctgtgtcctgttgatgggggtcctgagcacttttctggtcagctggctgggaaaagatgcgatggccggcgtggggttggcggacagcttcaatatggtcattatggctttttttgcagctatcgatcttggtactactgtcgttgtagcatttagtctcggtaagcgagatcgacgacgagcgagggtggcgacgcggcagtcattggtgatcatgacgttgtttgccgtactgttggcaacgctaattcatcattttggcgaacaaattattgatttcgtcgcgggtgatgccacgacagacgttaaagcactggcgttgacttatctggagctgaccgtactcagttatccagcagctgccatcactcttattggtagcggggcacttcgtggtgcagggaatacgaaaataccgctactgattaacggtagcctgaatattcttaatattattattagcggcatattgatttacggccttttctcctggccgggactgggatttgtcggggctgggttgggtttaaccatttctcgttatattggcgcagttgcaattttgtgggtgctggcgattggttttaatcctgcgctaaggatttcgttaaagagctattttaaaccgctgaattttagcattatctgggaagtcatggggattggtattccagcgagtgtcgaatcagtgttatttaccagtggtcggttattaacccaaatgttcgttgccgggatggggaccagcgttattgccggaaattttatcgcgttctcaattgcggctcttatcaacttacccggaagtgcgctcggttctgcttctacgatcattacaggccgaaggttgggggtagggcagatagcgcaagcagagattcagttgcggcatgtgttctggctgtccactcttggattaacggccatcgcctggctaacggctccctttgccggggttatggcatcgttttacacccaggatccacaggttaaacacgtcgttgtgattctgatttggctaaatgctttatttatgcctatttggtccgcctcatgggtgctacccgctggatttaaaggtgctcgtgatgcccgttacgccatgtgggtttcgatgttgagcatgtggggttgtcgggttgtagtcggttatgtgctgggaatcatgcttggctggggtgtggttggcgtctggatgggaatgtttgccgactgggctgtgcgggccgtgctgttttactggcgaatggttactggacgttggctatggaaataccctcgatccgagccgcaaaagtgtgaaaaaaagccagttgtatcggaataaacgacaaaatgcagattatttcagcaaacgatttcaaatttaaaaaacaggctttgacattgtgggtgggcatcgctaatattcgcctcgttctcacgattcctctgtagttcagtcggtagaacggcggactgttaatccgtatgtcactggttcgagtccagtcagaggagccaatttcctgctttcatgcatccttgcgaatccttatgttatttttattcaacaggttagcgtgaaaactcttcccggtgcattttgattttaccctctgcatcgggaaaaattggtggtcaaatctggggtcaggttagttcgataatggagtgacccccatatgtcccttaacgacgcaaaaatccgtagtctcaagcccactgataaaccctttaaagtctccgattcccacggtctgtatctgctggtcaaaccaggcggttcccgtctctggtatcttaaataccgtattaatggcaaagaatcccgtattgcactgggtgcctaccctgccgtctccctgtctgacgcccgccagcagcgcgaaggcatccgtaagatgctggcgctgaacatcaacccggcgcagcaacgtgccgctgaacgcggctcgcgcatgcaggagaaaatgtttaaatccgtggcactggagtggcacagtagcaagaaaaaatggtcgcagaataccgcagatcgcgtgcttgcccgtctgaacagacatgtctttccgaccatcgggcatctaccagttaccgagcttaaatcacgtcatttcattgaattactgaaaggcattgaggaaaagggcttgcttgaagttgcgtcccgctcgcggcaacacctcagcaacattatgcgttatgctgttcatcaggggttaatcgaaatcaacccagctgcaaatcttgacggcgtgacggcttctcccgccagacgacattatcccaccctgccactggagcgccttcctgagctgcttgaacggattgacagttatcaccaaggacgggaactcaccaggcttgcagtcctgctgacgttgcatgtgttcattcgctcaagtgaactgcgctatgctcgttggacagagattaacttcagaaatcggatctggacgatacctgccacacgcgaagcgattgcaggcgtacgttattccagtcgaggtgccaaaatgcgtacaccgcatattgtgcccctttctgagcaggttatctctattctgaaaaggattaaggaaatatctggcgggtatgaactggtgttccccggctatcatgacccctacaagccgatgagtgaaaatactatcaataaggcacttcgccagatgggatacaacacgaaacaagatatctgcggtcatggtttccgggcaatggcgtgtagcgcgctgatggaatccggtttatggtcgcaagatgcagtggagcgtcagatgagtcaccaagagcgcaacactgtgcgtctggcttacattcataaggccgaacatatggaagcccgcatggacatgatgcagtggtggtcggattatctggatatgtgcagtgaaatctgggtgcccccgtacatctggagtcagcaaaacattaatctcgcagtaacctgacttatgaataatcttgtaaagaaccaggccgtatcagcaaacgctgatacggcttttcatccacaggccgtttttcatcttctaagtcgtccaggacatcatggttcttaatacacatgcgttcgcatgtgcttatgttaagtagacttattgtcttacacattttatccgtatcattaaccagaatatgttccggagcagcgggtgatagtgccgccagtccacactcatcgctgcccggaaaaatcatcagtggggaggcaaacggtaagcaccccgctattctgcaagacatttctgcagtttatttaacctccccgaagcatttttataaggcgaggcggtattaaattgaatcatacgacctcgggtccatttattataccaaggtttaccgtaaagctcatcgttactgaatcgttcaatcaaagccacgagttgctgcttattttcctttaaccgtgccaataaaacttcgtactctgtaatatcctcatagtcacggtagaatttctgtgctaaacgccccaattcattccatttaaatccttcctcaggaaaaataatagtttttccttttgcctcttggtcatgccagtgtaacaccagctctccccagccaatcagataggaaaccagattcgctacgctaatcgtagtccccttcgcgtgcccttccaatagaggttcaaaggcgagttggggcgtaatagattctagcttcttatttaataaagaaaaattactattaatagctttaattaactcttcttttgatgatggaacagccatatctattgctccttgtatagttacacaactatttctaccctactatttcgagtgattcaatcgtctggttcacataacctaccacctgttcaaaatgcttatcgacaaaaaaatgatcggcagcaggaaatataatagtccgcgtctttcgtgtggtgaatttttcccatgcaagtaattcatcctgcattaccagattgtcagcatcgccatgaaatagcacgatcggacaggttaatgtgcgcgccttggcctgaaatacatactgctcatagagccgataatcgtttttaatgatgggggtgaaaattgtcattaactctttattacgaaagacatcaaccggagttccgcccagcttgacgatctcttccataaacgcctgatcgggcaaggtatgcagtattacttcatgagaggcccgatcgggtgggcgacagccggaaaaaaacagcgcgcatggcatgtcatgtccatgatcgagaatataatgcaccagttcgaaggccatgatccctccgagactatgcccaaaaatggcgtagtctccacctgtgtagtgtttcacaaattgttgataaaggtcagcgacggcatccaccatcgtaagacacagcggctggcgtattctagttcccctccccgcaggttctaaaggccgcaaagtaatattgtccgacagcacgctacgccatttataatacatggcggcagaaccacctgaatatggcaaacaatacaaactgatattactcatcgtcccactccttgttgtgtaatagaattcgtttaatttgatgatttaatgtcagaacgaaagctaacaggataattccgaacggtatcgccaacacgctcgatggaccccataccaagataaaacgccagtcaagtcctggagatagtatacccggtgcgacatagagcatggcggccacgagcccaggaaccgccaaggcgatgatatagtcacgtacgcgtaaacgtaacctctgctgttttccagggccatgcgccgttgcgcgataaacacggaaagcaccgcgcactacaaccaccgccccccaaaaacacagcaacaacgtgaggtagacgaaaagggtatcggtggctgtaattgcatcaccagcgccgtcagcatatttgccaatgcgcagataattatcgatatccgcgcaaagctgtagtatcagattcgaattcatatttgccagcgcaacaatgccaatctgctgatccggtcgcaacgcaatgcaagaagaaaagtttggattctgcccaccgtgactgatgtaagggccttgattctggtcgataaaccaaccgctggcatagaggatacgattgtctgcggcaagcggaacatcactattaccacgccaactgttactcatcgcctcacgcagcgttgccggcaaagcctttctgtgcaaccaggcgtctatccatatttccatatcaggcagagtgctatggatataggcggcaggaacatggttccgggccagaggcgcatgaaacagaacgggtttgccgaatcccagtttatagccgcttgccttgttgacaataatctcatcccccttaactgccacagtcgccgacatgcccagcggctgcgtgagtcgttccgcaatgacctctgtaaaggtttttcccgtcacattttcaatcaccgcgcccaacacatcataattggcggaggcatagctaaacttcgcacccggcgcaaacagcagattctcgttgcgcagttgctgtgccacagcgctcccaggcatagggttttccagccgagccagtgttgaaaaaggcaatcctgatgtatgataaaggaaatcagccacggtcagggaagcaggttttccctgataattcaagcgcatttccggcagataggtaatgatatcatccccttgccggagtctgccttcctgaatcagtatttgcaccacaagtccggtaaacgccttactcatcgatcccagctcgtaaactgtgtctagagtattcgctttctgactagccacatcggcaacaccgtagacaaatcgctgacgtacccccttaatggtcacacttacggaaagggctgggaccttggcctcctgcatccgttggtgaattaatgtcgacaggcgctcatcttgcgccccgataggctcatgttcttgcgccaaagcgcacatagcggaaataaagagcagcatacagcacaggagatgatataatgttttaatgctaacgtgttccattattgtcatcctgtgaacacctcataaaataccatcaacacattcggagataaattcactgtgctcacggatagcgggtctggcataaatatcggcggcagtcagtccgattttataaatgtggttacagctgtcgacgaaagagataacgtgcatcgaggtcgctccgtattcgaaaataaccgcgtgttcgtcataatgatcgatgcataacaatgaacgccaggttttctccacaaagtcgctgaccgacaaataactcactggtaacatagcgttctctctcgcatcactggactgaatttcataccggacgcgatcaaacgaataaccgggtaagcctatagtctgcacggctggcatttccggtaaacaaatagtcactcctcgttgccaaagagtgcccaacagcggcaggatgtcctcaggcgtatccgtattcagcatgggggaaaatactgtttgcccaacccactgcgcatgctggtgatacaatatggaaaacgtccccgcgcgaccgatttccagcatcagcgttccctccgtcaccgccagattagccaatatttcgctcagttcactgttgccggccagcgtctgctccggtgtcgtttcagccacaatcacctgctgaacagcgttttccagtgagatgatgcgcgcaacatactgcgctgctgcagcccccgtcaggtaaccgatgtgctgcacaggcgagatactttgttcgatcagccattcactaagactcacctgctggataaactgacgcaatgctggcgtccaatcggctggttcgcagatttgtgcaacatcctgagacaggcgctggtgccgctggcgcaagttaggttgacaagccagcaaatgcgtcagggcactctccagcttatcgtcccggtccggatataggaacaccaaggtagtttccatattgataggggtaaaagacatgtcagcatcccgcagtttcgccaaacttgcacgcaacgctaccacactgtctgccgccagcgcacagcgatacgggaaatgtgcccggcgttgcgcgagagtataggcgatacgatctttatctgcttccgcataggtcgccagagcgtgataatgagcatccaactgttgtctaagggctaatggcgttttggcgctgaagaaaaacaggcggcgctcattttcttgcaccgcttgcgcaggcgtctcgcaccagttttgcagaaccaaatgagcattggtccctcccagcccaaacgaactaacggtggcatggatccttttcgtttgtgggacagaagtcactacatcactgagataaaatggcgaggctggctgcaacagttttttatgtttatttactaggttgatctgcgggggaactaaaccagtatatagcgtcagtgcggttttcattaagctgacgataccggaagcgactcccaggtgacccaagttggcttttaccgcacccaattgaatgctgtgcggcgcacatgccggtgcgaaaacccggtgcagagcttcaagctcaatctcatcacccaacggggtaccggtaccgtgcgtttcgatcagtgcgatatcagtcggtacgacttctgcggcggcaagcgccgtattgatcgcttctacctgtccttctacgctgggggcgacaaaccccagccgacgcccgccgtcgttatttaccgcacctcctttaatcaccgcatacactctgtcttggtcgcgtagtgcatcctcaagacgttttagcaccacaactcccgcaccgctgctgtataccgtgccggtcgcctcagcgctaaacggggcgcagtgtccgtcttgcgataccagcttatcaccttgcggactgtagccgtgcgcctgtaaaaaacccaaggtgaccccacctgccaacgcaacatcggcttgaaaagtcaataacccctcgcatgctaaatatgctgccaccaacgaactggaacaggcggtctgtacactcacagcgggtccggtaaaccccaacttgtaggcaacctgagcacacaagtaatccttttcgttaccaatctgcgcctgaagataatggtgatcgccgctcatcttcaggtatggatagacgcgatcgataaaatagttattggcgtaggtcgccccatagacgccgactcgcttaagttgcgtgggaatatagcccgcatgctcaagagcgttgtagcagcattcaagaaatattcgttgttgcggatccatcaacagggcttcgccaggcggaatattgaaaaatgcagcatcgaagtcatagggagcggtgattatattgcgcagcctaatccaagggttcccattatcgtcttctgtgcatgtcggttgagtgaactcctcacccgccagcaacttatcccaccactcgggcaccgattccgcaccggaaaaacgcccgctcatgccaataatggcaatatccagtgagccacaggtaaaatcatcctttgccattgttgtattccttaagggttggcatcgtgtttatagtgtccacaaagtcggcgcgcccgtcagcgtggcgctgtgttggcacagccaggcatccagatcagtgaggctgttcttgtagcgcgccagcaggagttgcacatcattcagcgcaatgcgcgtgggatcgaaacggcagtggaaggagagaccatcagctgccgagcgcgcaatattaaactccagcacgcagccgagcgcgttttcaggcgcggtatagatatcactattaaagtgatcaatatgaaaatagcggagtgaaggttgcgcctgcacaccgatgtaattcattcggatcccttgcgcaagagagtcttccggtgcatgccgcatttgcagcagaccgtaatctcccccaccatgcgtgcgttttgccaaatcggaagcgatcgcagataacagtgtcgccatatcgccatgcagagggatcgcccaaggataaaatagagtaaaccacccgaccgtatccgcaacgtcaggctcatcgggccagcagccgcgtcccatgccttccatctcgatgcgacaccaaggctcttcgctgtagtaacgcagcaccagcgccaatgccgttagcacataggtttcggcgctgtacgcggtattaccactggattcaaacaacctcctgacgcaaggatggcgaaagtcttcacgccaagcgcgcgtacgaggtaatgagtcatctggcaatgacacgggtgggaaatgcagcggtagcgtttgacatactgtgcgccagctttcgtgtgtggcggaatctaccgttttgctcgccagatagtcattccagcgatgcagtccgctgttgctggtgccattgacagtgctgacggcgtccagcgtgctgaggattaaataccaagagtgcatatcgacgcacaagtgatgggcacagagtaccagcgtgctagacgcaggctgcggggcgtgtaacagagctgccgtaaagactcgaccatttgtcacgtcaagcatgctattgcactgagcgatcacctctgccaacgtccactgcgccgtcgaatattccgtgagcacctcgttgggataacacacattagggtcgcatactagcaaccgcccctcagcgtccagcgcactgtgcaaagctggctgctgctggattaatgtatgcagcctgttgtgtaactgctcgagcgggcaagcccggcaacactttcagcacaatgacatggttataaacattgggcactggcaacgccaactgcgtaaaccaacgcaatgcgggtagatcgatacgggtgttatgagcatactgcgcgagctgtgacaccgttgtatgactagcgagaaactcacagatggcgttcactgttccacactccatcacctgcaccgctgacatcgtccagccgtggtgcctgagctgcgctgcaatctggatactcttgatggagtccaaccccaagacataaagattttcgttatcatcaaactcagtttgctccagcgccccttccacacatacccgaactgaatgccttatcgccgcatctcccagccgctcgctacccgatgcaggcgcggtgtttcggaccgttgcgaccatctgacgcacgtccaccttgccattgtgcgacagcggcagttgggcgatagcacagcactgcttgggttgcatgtaggtgggtaattgctgacgcagatgttgcattacggtagctacatcaacagatgacggtgtcacgcaggctagcaacccgctgtgctgcccctgcacatcatcaatcaccgccaccgccgcactttctacctgaggtgcgctcaacaacgcttgttcgatttcgcacagctcaatacgatagccattaattttgacctgatcgtctttacgtccctgataaaccagcgtattaggagcgatggcgtagccaatatcaccgctgcgatagccaatcatcaccccattggtatctttaaggtaggcggcggccgtttgttgcggcgcatcgatatagccctgcgtcactgacgcgccataaatcaccaattcaccagtttcgccttccggtaccggacagccccaaggggagcaaattgctacctggcaaccgtcgatcgccataccgatgggcaatgaaggcagcgtttcttgcccggtgtagcgatagatcatgcaaccaacggtggcctctgtcggcccatattcgttatagatcacggcctgaggaaagagagcagccgccttacgcgccagatcccgcttgaaatcctccccgccaaccaccaaggtacgaatctgctcactgcttatgccagccgcacacaacaaccgcaggtgtgcaggcgtcagtttgatcactgtgttgggctgatcaaccacggccatgcgcagcaatgtttcgctctcggcgtgccgacaaacgctgatgctagcgcccacacataagggggcgaacagcgtagtgatggtcaaatcgaaggacagcgaagagtagagcgcagcccggtcctgcgctgtaaagtaacgttcggcggcgaaatggagatagttagccagattgccatgagagacttgcacgcccttaggctcgccggtcgatccggaggtaaacagcacatatgccagatcctgcggttcaatagctggccaaggttctctagcaagcgccgaagtggctaaggcctggagcaagctggacgcgggaaacgccagcgcctgcgtcaattcatgcatcgccggatcgtaaaggatatgcgctacctgcgctttacgacacatggcgtaaaggcgggtcgttggcaacgcgggatttagcggcagaaatgccgcgccgcagcgcaaaataccataaataaccatcaccgtttgagcgctatgctcagcgataatcccaaccacttgaccgcgtccgatcccctgttggcgcagataacgcgcaacccgctcaacagcgtcatccaactgccgataagtcaaagactgttcattatcaattagtgctgtgcgatcaccatgctccacaacttgcgctgcaaatcgggaagtaaatgagggtttgagtgagccacatgccaatgcgacgtgcggcgcaggatagacttcgagatcgcctagacgagcgtcaggttgccgatccaatgcagtgactaaatccaacagcccatttttcatcgctgtcagttggtgcggagtgaaagcgctacgcagcgcctccagactcaacctaaggctttctttatgattattaacagtttgcaaaacaatctgtagcttataggactgctcgccgctgtagtaactctccacgcgttgcgcggcacctgcaatgtggcgttcataggtaaagttataataattaacgcaataatcgaacgcccgcaacttccctcccccctgttccgccaaatcctggttgaataaggtaatgggatatttgctgtgtttaaaaccgcgtttcagttcgcgctggaaaaaggccacccgttcacagaatcgttccgtgcgcaccagtcgataggccagcggcaattgattagtaaacatgccaaagcaacgccgcgcctcgcgagtatgccgattggctaacggcacgcctattacgcctttttcctccccccatactctggcgcgatagagagcgaagagtgcaataaacagcgtattaagcgtacagccataacgattacacaacctgtagagacggttaatcatggctggctcaagccaagtggaacaactgatgccctcagtagtaacgatgggggaactgtctggaaagcagtcgcggtattcgtcgatatagtcacgccaccagccacgatcaacggcaaagcgcgttgacgcctgataagattgctgctgcgccagaaatgcgctataggctggtgacgcatcatctggtacgtcctgctgttcgtatgctcgcttgacatggtttgacaacaacgccattgaccaaccatcagcaatgccgtgatgggctttaaataaataaccgctgtattgttcaccgcacgtaaaggtgacaaactcgaacaaatcgtgcgccagcagggtaaagggctgccggaaccactcatcaacaaatgtttcgatcgccgctgggcgtaggttctccttgtcataatctggggaaaaagtcaaatggcggatatcgcgccagtgataaggctgcacttggctgaccacttcactctcctctcccatcacaaaccacatacgcaacgcatcaaattgccgaatggcggactggatggccgcgtgtagtcggggcagatcgacaattccctcaatggtgaccacaccaccaatgatgtttacggcactgtaaggatacagttgatcaatgatgtggcactgttcctgtggccacgacaacggattgcccgacatcatggtgccacctccatatccaagtgttgggagcgcaccgcctcctgattccatcgcagcagacgaggtgaaagacgcagcagacgccacgccaacaacgcagccacaaaagtgccgctcatcgccccaaaatagacgccggtaatacgcatctctaacacaatcgccagcaggtatacgacagggacagatataaacacgtgacgcatcagcgtcaacaacaccgaataccaaggcttaccaatggcctgataatattcacttgctaacaggctgatagcgacaaagggtagtgccagtgccatgatacgggtttgcagtaccgcatagtcactcacggcaacaacacgagtaaacaggggatacatccagggtgccagtacaatatgcataacggctaacaccagcacaatagagaaggccagcgcgacggcggcccaataggcattcagcgtgcgggtgacatttccgtgtccccagttttgccccaccacagtcagcaacgcggtcgcgatagccagcatcggcgtgatgatgaaatagtcgatgcgaccagtgagcgtaaacgctgccatcgcgtttacgtccagcctgacgataaaaaaattataaatcactatgccgaccgcaatgatcagttgcatcagcatctgcgccatgccgacggagagaaactctcggtagattttccaggagaatgggcgtaacgcgatgcgtatactcaacccgatatgtaatcccatcaatgtgtagatgaaataggcgaccatactcagttgcgccagaaacgacgccaatgccacccctttcacaccaaaatcgaatacaaagatcatgattggatcgagcataatatttaccaacgcccccaacaatgaggccttcatgatgaccatgatcttacccgcgccttgaaacagccccatcatgacgccaatcaacatgatgctgaacacggtcagcagcgaataataatagaactccgttgcgtagccgatgatgctcttcgtggcccccagtgagcgcaatagcggctgggcataaacatagccaagtacggtgatcacgatcgcaaagaatagcgcgatgatgataccgaccgacaaaatccgctgtgcacgatccaaccgctgcatgccgatggcgcgggacagcaaagatcccataccgatttgaatgccgttggcgatggcaaataaccccattccaacggggaaaaccagccccacaccggcaatgatgccgctgttggtgacatcaatgtggctcagccaaaaaatatcggcgatggcataggtcacctgcgttaacataccgacaaacatcggcaacgccatgcgcaggagtaatttatacagcgagccgtcaaacatacccgccaccgtgaacagctcatcgttcggcgtgccgttgtctggctcaagcttattcaccgtcatacctgctccttattcattaaatgcgccgcacctttattggcgctgtcaccgatatccgcctctagtacccttccggtaccgtgaatccgccactgatgctttcgcagaactcagcaaagttaatcgtcacatcatcgtgaaaatgcccggaaatgatctgtatgccgcacggaagctcatccatcgttttcgccaatgggtaaacggtggcaggcaaaccaaaaaccgttgctaacatgttccagaacaaatgttcgttgtaatcttgcggttcgccattgacgataagcttgcgcttacgcaccggctgctgcatgtgcgcaaacgccagcaccgggctgacaggtgtcaacaacacgtcataacgcgcgaaaagggtttctatcacccggctgtattcgtggcggagtttgtctgtattccgctgttcgccactgtctttcagcatgccctggtaatagctcgttatcccctcaggcacatccgccagcttgcccacaagcctgaagcccagcgcagccagcccggctgtaagacgctggcgtccattgagcgccgtacttaccagccgaccactgagtttgactgctatatcaaacagtgcgtcgggatcgatatcggcgggcatagcatcatcaacctccacgccaggctgtgcgcgtaacttgtcgataaacgattgaaaacgctgtgcgatctgttgatctatctcatggtggggcgcactaaaccacgtgcacacgcggtagtttgctttggcctgataacggctaaaatcgggaatacgcggcggttccacccagaatgtgctcaatgcgcgcatcatcagacgcagatccgccgcgctgcgcgccatggggcccgccgtcgagagatccggctcatcagtcgcttgcggaccaccaccgggcacatgtcctctgaccgacatcaaccccaagctacaacgatgggcatagacacctgtgtagtgtgcgggaatgcgcagtgagccaaacaaatcgctgccaaattccacgggggtgaaatccgccgccaccgccaccgccgctcctccggacgatccgccgggtgaacgttgcctatcccacaggttatgggtggtgccatacagatcgttataggtttgccaatcggcagtcatcatcggcacattggtttttcccatcaggatcgccccggcagcgcgtaagcgtgcgatggaaggagcatcctgcgtcgcccggttatctttcagataatgggcaccggacgtggttaaccacccttgcacgtcaaacgactccttaacagtacaaggtaatccgtgcaacacgccccttgcgcgcccctccagtcgctcacgatcggcgcgcgcggcggcctccaacgccaacgcatagtgctgctgcaccaccgcattcaacggcttgttaaactgcgccatacgtgaaaaatagtgattcaccaacgccactgaggtggtttctccggacgccaactgtgccaacagtgtccctgcgctacgatagctctgctcactcatcgcccttttctccctgttgggcacgtttacgccgcaacgccagattctcgcgcgcagcgctgacctgcgaaacctcagcctgcgctaatacgatatcgtgggcggcgggtagattgtgcagttgctcatcaaggtaacgcgccacatccgcgatggttggcagacggaacagatcgacaatgggaatctcctgcccgataatcgcctcaagtgcctgctgaatacgcaccaattctatagaactgccccccagcgagaagaaatcgtcttcggccgacacgtggctcacgccgagtacctcctgccagagcgccaccagccgctgttgtaacgcactgtccacctggattggacccacgccgtcacgctggtgggcaatttgttcgccctgcagctgtaatttttgccgatctagcttgccgttagcggttaacggaaaatcggtcgctaacatcagatcactcggcaccatatagtcaggcagttgctgacgcaggccgcgcagcatggcatctttgtagctctgcatgtccagcggcgcagcggtttccttcggtttctcataggtggagaaatcgcgcagcaatgctgcagcacttgccgcctcttgccctatcgcgccccccacggtgcaatggacatagcgatgatgtggcgacaattgaaaatgcgatgccacagcggaaaagtctgccatcccaagttggcacagccccaatccgtagcgcggcgcatcttcttccagtaaatggcagagagtacctgcttccatcaccgagaagtgccaagctgcctcttgcccatagaatggcgagatcaccgccatatcagccaccataaacagcgtgaatgccgcccgatcggcaatagactgattaggtccggcatgaaaaccactgttcagctcgacttctggtgctaccggcataagacagctctgtcgcgggtcgaagtagtaaataccggatactccctcttcgatcttgtctggatgcaggtacacgtaggtttgcaccgggtatagccccccggcggacgcataggcatacttggcaaaaggtagaccgggtagacgcatctgccccaagcccgacagcaattgccccaactgtgccagcgtggttttttgcgcgctgaaatgacgatagctgcggcgtttgatgtaacgtgtgctatccgccggtgccgtcagtgcaatgcccagaccatccagcgcgcgaatatgtggctccttgagtttgaacgctagacgctgtgccggattcacaataataccctgcgccagtgccgccgcctccgcttccttagcttgcaatgcctgcgcctggtggcgatcgtgcagtttggcaaaagcgaccagccgacgatgttgagaattacccactgccaccaccactgactgctccacatcgggatgtcgcgcaatgcagcgctcgatttcccccagttcgatacggtaaccattcaccttcacttgggtatcgttgcgccccaaaaaggcgacttgcccgtcagcaaagtagcgcccgcgatccccagtgcggtaaattcgctcaccactcgcttcgcgccagacaaagctcgccgccgttttctctgcgtcgttcaggtagccttgtgccagccccatcccgccaatgcaaatctctccttccaccccgaccggacattcctccagttgcgcatttagcacgtatactggctggttgcgcaggccccgaccgtagggaatactggtccacgtcgattccacctcacctatcgggtagtagaccgaccagatggcgcactcggtcgctccacccagactgatgatgtccatcgtttcattgagccgctcgcgcatctgctccggtaacgttagcgggatccagtcgccgctcaacagtgccagacgcaacgtcggataactcatccgatcgccgctgtggtattcgcacagcatctgcatcagtgcgggcactgcattccagacgcttacatgaccgtgtgccataactgtctgccaatgacgcggatctttttcccgtcctgcttccggcagtaccagcgctgcacccaccataaaaggcgcaaaggcatcgtaaaccgacaggtcaaagctcaatgatgacagcccgaacaccctatcctgcgcattgaggccaaagcgttcgttgatgtcttccagcgtgttcatggccgcacggtggtcgatcatcactcctttcggggtaccggtggagccggaagtgaaaatgatataggccagatccgtgacatccccagccacttcaggcaacggcgcagcaggcgtgtccagcattccgtcgtcgatgatcagcacgggcagcgacggctccaattgcgtgagacccggctgcgttacttgtacccgcacctcgcccaccgtcagcaaaagctggcgacgctgtggcggtagcaccggatccactggcagatagaccgcacccagtcgtaaaatgccgtgtacggcggcaatctgctgccagcctttttccatcaccaccgccacgcggtcgccatgctgcacgcccagcgctaacagggcgcgggccacatgatccgccgccgtcgacagttggcgataggtcaattcacggataggactgatcagcgcagtttcctgtggcgtcagtgctgcctgacgcagtaacccatggtgcaacaaggccgtaggtgcaggagcctgcgtgaccggtgcactaacggtgggcagcgccagcacatcttgagtctcatgccagagctgtggtcgctgggctagggcgtgcaggagttggcaataacactggaacatctgatccattagcgccggttcaaacaattgttccaccacgtcccaattaaagtgcaattccccgttacgctccattacctgatgatcgagccacacctgcggtgtctgtgaaatactgtacagatcatcctgcggttggttgaacagcgtatcatccgtttcccagctcgcctcatattgattgagcaagctggtgaacacgataggaatcaccgatttcgccggatcgcggtgagtttgtaccagcagtcgagagacctggataccgccaaacaagcggttatccaaatcgcgccacagttgagagtggatcacgtttgcccgcgcctgcaaggtttctccctgcgacatatcaatctccagcaacgtcagtgcagtaaaatcgccaattaagtgattgatatctgcgtgcaacggcagacgattaaacagcgtcaggttaaggctaaagtgcggcgaggaactaaagcgcgccaacacctgagcaaaccccgtgagcagcagtgtagtaggcgtgatactcatctgacccgcctgcgttttcaagcgctgccagatagcacgagatagacaatagctacggcgcacgaatgtggggttttccagcttcgtggggtcggtacgcagcggcaatcgtggccccggcggcagagtttcgatgcgggcgcgccagtagtcacgtgcccgttcaaactgcggcgttttctcgtaggattttaaggtcagcacatagtcgcggaaactgtacgtcaatgtaggcaatgccgcctgcggatggcggtagtgataagctagttcccgaatgaacaactccagactccatgcatcggctatcagcaggtcgatagatacatgtagccgggctttttgctgcggatcaaccacgacctccatctgaaacagaggccagcgactacaatcaatcatctgatgtgagagggtgtcacgcagctcacggcaacgctgttgaaacgcatcctcgcactgggtggtatagaaggcaacgtggtattccggcacgtttggcaatatctgctgcataccgtcatcgttgacaattgcacgcaacatgctgtgccgcgcaatcaccgcattgagcgcgcggttgaacgctgtttcatctagcccctgtagttcatattccacatagatatgggtggaaatattgcccaatcccaaggattttcgccgcccaacccaataggcctgttgcacgtcagtcagcggaaaaggtaggtgctgctggtcaggggcaaagaccgtatcaggcaatgctgaaaccgctgtctcactgccgccttgttcgagcagatagcaacttaatccctcgatggtgggatcggcaaagaatgcgcttagcgtacaggtgatgccgtaacgttgctgaatatcatataaaatggttgacgctaacagcgaatgcccacccagttcgaagaagctggcgtggtgatcatcaatgctgacaccaagcgtgcgttcccatatctccgtcaccactgcaataatatcggattttgttgcgcgggataagagattattcgacgattcgtgggagaacgtggcaggccgtacggcctcgacccaatagcgctgcggtgtaaaaacggtccccggcagggcgatgcgttgactgcccaacatacgctccgccgcatccacccagcgccaatctaggctgacgccagccaaccataactgccctaacgcctctagcgcggtgcgattggcatcactcgccgcgtcgtccagcatcaaagagcagacatcgggctgcaagaggggattcgtcggcacatcatcaaacggttggcccgcattcaacctgtgccatgcttgctctagtgtgcagtctcctcgtagtacggcggcagcatagccaccatcaccgtcgccgcatagcaccacattcaacgtttcccgttcgtcaatcaacgcgatcagcgcatactggctgataaacgtccgttgcgcagggaagagatcttgcagacaggctggttcgagcggaaaatgctcgagcagttgtcccaccgcctgtgacaacacctcagagcacgccagccagtcactaagcgtctcgagtgcaacaacgaaacggtgccccaatctccagtagatcgtgcaacccgtggttgcctccaccatcggtgcgtcgcggagttgtcgggctagctgggtgcaattctctgcgatgacacacttacgtaccggggcggagaaacgcccgtgacgcagggtgtaagccacgtcctgtaagcgtatctctggatgtgcggccagtttcgccagcagggcgttttgcatctgttccagggcattgtggttttttgccgagagtacaacgacacaaggccccatctgctgcgccctcgcctgcggcgtcgataacggcgcttgtaccaccagatgtgcgttggtgccgcccaatccgaacgcactcacaccagcggtgcgtggcgtggtgccctccggccaaggcgttaaacgggacaccacttcaaacgggctgtcctccaaccccagttgcggattagcccgttgaaaattcagcgtagggtaaaacacccggttagtaagactcagcaccgtttttatgagactggtgatgccagatgccatttctacgtgacccacgttaggtttcacagcccccagacgccacggtgtcgcattcggcgctggcgtcccaaacacacgtttgatggccgcgaattcgatagcgtcacccaacggcgtgccgctgccatgcagttctagatactgaatttgctgcggcgtcacctccgccaagctatgcgcctcaatcatcacagcttcctgaccatcaacacccggcacggtataaccactgcgcgcaccgccatcattgttgatggcgcttcccttgatgacggcaaggatgttatccccttgcacctgcgcgtctgtagcccgtttgagcagcaccatgcccaaaccactgctgtagaccgtaccgctcgcctgcgcatcaaaagtatgaatcaggccatcctctgcttgcagcccatcaccgtgcgattcatagctgcgctgctcctccatgcgaaacgtgacgccacccgctagcgccatatcgcactgaccgctcagcagcccttcgcaggccagatgcactgccaccagcgaggtggcacaactggcctgaaccgtcacgcaagggccggtaatattcaggcggtaagccagttgggacgtcaaatgatctttgtcattgccgaccatgatttggagaccaccgagttgtgcaagcttgtctgggttgttcatcaggtgagtaagcaaatagaagctggtactcacgcccgcatataggccgacgcgcgcatcgtgctgcttcgggttgtaaccgctttgttcaaacatctcccaagcacaggtcagaaatacgcgctgctgtggatccatgatttctgcttctgcacggctgtagccaaaaaagttggcatcgaactccgccatgtgctcatagacgttgttcagcgtaatgtgattgtggccgttgctcggggtcactttggggtccaaaatgttgcatccggtgcgaagcaccgtttcgaatgccgcaacgctgtgcacgccggggtaccggcagttcatgccaacaatggcaatatcgctttcactgtaagtcattagtttttccttaacgctgacgctggtgacgacgtacaagtcgttgctgggcgcgggatcgggaagcatcacgctgctgtgtttgattcaccgcccgtgcattgtcctgcatagcctgcaaataaccggcaattcttttcacggtggttaagcgaaatagctcagcaataggtaccgtaaccttaaaaatctcctcaatacggcgatgcaacagcacgatctggattgagccgccccccgcttcaaaaaagttgtcattcagtccgatctgttctcgttgtagtacctcgcaccagagagcggccacctgctgttcatagggcgaggcgtgcgcgagggccctcgacttctgtgatgtagattgcgacatacgttggataacctcttgaaccattgccgcctgatcaattttgccgttgcctgtcatcggcagcaccttgagaagaaagaaatgttggggcagcaggtaatacggcaactgcacggctaactgagcacgaacacgcgctaacagggcgtcagtatcgtcaggatgcaggttttctgcggcagtgataaaggcatacagctgtccctggtggcacaccacggcggcactccctacgctgtcgagctgttcaaggtggcttttgacttcccccagttcgatacggtaaccattcaccttcacttgggtatcgttgcgccccaaaaaggcgacttgcccgtcagcaaagtagcgcccgcgatccccagtgcggtaaattcgctcaccactcgcttcgcgccagacaaagctcgccgccgttttctctgcgtcgttcaggtagccttgtgccagccccatcccgccaatgcaaatctctccttccaccccgaccggacattcctccagttgcgcatttagcacgtatactggctggttgcgcaggccccgaccgtagggaatactggtccacgtcgattccacctcacctatcgggtagtagaccgaccagatggcgcactcggtcgctccacccagactgatgatgtccatcgtttcattgagccgctcgcgcatctgctccggtaacgttagcgggatccagtcgccgctcaacagtgccagacgcaacgtcggataactcatccgatcgccgctgtggtattcgcacagcatctgcatcagtgcgggcactgcattccagacgcttacatgaccgtgtgccataactgtctgccaatgacgcggatctttttcccgtcctgcttccggcagtaccagcgctgcacccaccataaaaggcgcaaaggcatcgtaaaccgacaggtcaaagctcaatgatgacagcccgaacaccctatcctgcgcattgaggccaaagcgttcgttgatgtcttccagcgtgttcatggccgcacggtggtcgatcatcactcctttcggggtaccggtggagccggaagtgaaaatgatataggccagatccgtgacatccccagccacttcaggcaacggcgcagcaggcgtgtccagcattccgtcgtcgatgatcagcacgggcagcgacggctccaattgcgtgagacccggctgcgttacttgtacccgcacctcgcccaccgtcagcaaaagctggcgacgctgtggcggtagcaccggatccactggcagatagaccgcacccagtcgtaaaatgccgtgtacggcggcaatctgctgccagcctttttccatcaccaccgccacgcggtcgccatgctgcacgcccagcgctaacagggcgcgggccacatgatccgccgccgtcgacagttggcgataggtcaattcacggataggactgatcagcgcagtttcctgtggcgtcagtgctgcctgacgcagtaatccatggtgcaacaaggccgtaggtgcaggagcctgcgtgaccggtgcactaacggtgggcagcgccagagaactatttaccccccaccaactttgcggcatggcaaccagcgcctgcagcgcatgacaataagcaccaaacatctgatccagcagcgtggtatcaaacagttgctcgaccgcgtcccagttgaaatgcaactccccagccaactcgatcacctggtgatcgagccacacctgcggtgtttgggtaatattggcgtccggacacagagtaaaacgggttgtgtcccgagggtcttgcgcagtcgtctccccgtcgatatccaacatactagtgaataccaccggcatcggcgcatggaaacgaccgctatggatcagcgcctcgctggcgcggatcccactgaaacgacgatgttcgagatcttcccacagttgcacctgaatacgctgagcgttgtgggcataagagtgctggctgtcgtaacaaacattcagcaagctgacagcggtaaaatcaccaataactgcctctgcgttggggtaaccctgcgggcggttgaacaacgtcagattgagcgtaaacgtcgggctaaggctccaacgtgccagcacttggctaaagactgtcaacaacaatgccgtcttggtgatacgtgtgcgttgggccagcgcgctcagcactccccagttgtgggctgacagccgatgacggcgacgtacgaacctgatcgcagacagttgcgccaaatcgccctgtacgggcagcgttggtgggccatacagctgcggcagcgcccgttgccaataggcctgatcgcgtgcataggcttcactcgcctgctctaccaacagcgcctgcacgtagtcacgaaaagagaacggtagcaacggcagtgacacatggggctcacggtacagcatcatcaactcctgctgtagcgtgcgcatactcagagcatcggcaatcagcagatcgagactgaaatgcaagcggccatgttgcgccgtgcaagccgaataactgaaatcaaacagcggccaacgatctgcgggatgcacatgatgcgacagccgatcgcggatcgccatcaaggcatcgtttcgtgcgttaggggacaaagcactcagatcgcgctgctctaactgatacgccggcacttgcgccagaatctgctgagtaccgtcggggagtacccgcgcacgtagcatttcatggcgagcgatcagcgcattcaccgcatgggtaaaacgcgtaacattaaagtgttctacgtcaaattcatggtagatgtgggtcgcgatcgaggtagcacccgtctgtcgtccaagccagtaggcgcgctgaacatccgtcaatgggaacggttgatgacgatgctcagggtcgtgcactatcacccagtcatcctgagacgcggcagcgtccgtgatagattgctgtgcaatacgcgcactcagtgcccgtagtgtggagtagtggaaaatgtccttcagggtcaaggcgcagtgaaaagtgcggttgatctctgctaccaacgttaccgccaacagcgaatgtccccccaagcgaaagaaatcgcactcaggatcgacgttttttatcggcaaatagcgcatccacagcgccagcaacatctgttccgtgtcgctcagcgcttgcgtctgcggcgacacaagggagctatcggcaacgaaattttccgctaaccgcttacgatcgattttaccgttgtcagtgttcgggaagtcggccaccctctgccacagcgttggcaccatatagtctggcagttgctgccgaagctcgtttttcagttgctcgaatagcgagggaggctcactggtgatgatgaatgctgccagtgctttgtgtaacggtgctctttcaatacaggccaccaccgcggcgtccacatgcggatgccgtgccaacgtccgttcaatttcgcctaactcaatacgataaccgcgcagtttgatctggctatctttgcgcccaacaaaaaacaactgcccctgcgcatcactcctgaccagatcgccagtgcggaacatcctgccaccggggacccctggttctgacaagaagaactgtgcgttcaactcaggctgcccatcatacccttgcgccacaccatccccggcgatgtaaagctcgccgtcaacgccttgcggcactggatggccctcattgtccagaatgtatatacgggtattggcaatgggagcgccgagggtgatgttttccgcttgggttatctgcgatttcagcgaccaaatggttgtttcggtgggaccgtagaggttccacaatgaaccacaacagcgcaacagttcttccgccactttcgttggcagcgcttcaccgcctgccagcacacatagttccgggtcgccacgccaacccgccatcaacagcccgtgccagaacgagggcgtcgcctgcatcagcgttggtcgatagtcggcaatcagcggaatcatacggaagctgtctgcggcgcgttccgcctctgtcagatagagactcgcaccggagatcagcggcaacagatactccaagaatgagatatcaaatgttggcgtcgtcaccgagagcagccggtcttgcgagccaaccgcaaaggtacgctgcatatccaacaacaagttcagcaacccgcggtgaacaacgcacacgcctttaggttcaccggtactgccggaggtaaacaacaggtaggcctgcatatccggcaacagcgcgcaaggtgtagaataccggatcgcattcgacatgtcctgcatcaattccggcaacgacagttgtacaatttcaccccactctcccggctgacggaccaccagacagaccaaacgcgcgcgttgcataaggcgttgcaaacgcgcggcaggctgatgaatatcgaacggcacgtagcacgcccccacaaaccacgtcgccaacatggttgcaatcacatccctgtgacgtggcaacagcacgccaatacgatcgcccggttgtatgccatgcgctcgaaaacgcatcgcgatgaactgcacacgcgcccagagctcagcgtaggtcagtgtgccgtcatgctgctgtattgccagttgctttgggtgctgcacacagcgctgttcaatgatacgcagcacatcctgcggcccgagccacgggacgttagtggcgttgagcggatcacgccgcggcgttgcggtctccggtgcatgcagagggatcgcccctatcggggtctccagtgatgatgtcaacgataagcagtgctgacgcagcgcctcggcaatctgcttcaccacatcagcatcgtataaccccaaatcgtactcaaaggagacgtcgaacgtggcgtcgttttggaacacctcgactgtcatgtcgtatttgacggtctgattgtgatacgtcacctgctcccaatacgcaccagccaaggtaaaagcgcgtggggtcacgtggttatggtagatatagaggatctggaacaacggtgaatgggaaaggctgcgagggagatccagcatattcaccaagttttcaaacggcagttgctggcgcccctgcgtctctttcacgctggccttcacacgctggagcgcctcgcgccctacctcaaccccattaaaatcggtgtagataaccgcagtgctggcataataaccaatgctactctgcaattccgggcgaatgcgccccgatactggcatgcctatcaccaatcgctgttgctgagcgtaacgcatcagcaccagttggaaggcagtcagcatcagcacgaacggcgttgtttcctgcgtgcgggctacgtgtttcaacgcgaggcttaatgtttcatccagggtgatgctgaaccgggaaccatgtgtagagggttgtgccgggcgcgggtgcagcgatggaaatgtcgacagcagaggcgcgtcttgcaaacgcgcacgccagtaggcaagttcgttcgccagcaaggtatcctggaaccattcgcgctgccagaaggcataatcggcatattgcagcggcggcggaggcagcgacgtttcattaccagcatgcaatcgagcatactgctgctgtaactcatcgaacaatagccgtaacgagataccgtcgatgatgatatggtgcgcgcaaaacaccaaatgacaaccttgatcgggttgaataatctgagttaccccccacagaggaccgcgtgccagatcgaaccgggtgtttatcacctgctgaattaccgcatctagcgctgaagttggggcctgcgctgccagcgtgaccgtatcgagaactaacgaagacgcatcatctatcacctggcaaggccgatcgttacgtactatgatacgggtacgcaagatggcgtggcgtgcttgcacatggcgcaatgcctccgtgagcatcggcatatccaccacgccatgcaaacgatacaccacataaaggttgtagttagtggcggtactgtcgtatttttgcaaaaaccacaaccgctcctgattaaacgacagcgggattgcctgcgccggatccgctttgatgatgggaatgcggctgggcgacacgcctgattgcgccaactgtcgtaatagcttttcctttttttccgccggtaacattcgcgccaatgcggcatgatgtatcgtcatgaccgtcctttccttttcgctgtgttaaatacttttgccaacgtcactcattaatcatgtcgttaactagcacggcaagtgcggaccctccatcatcctgctgctcctgctcgaccaactgcgctaacgcgcgcacgctggcatcctccatcacgtcgaaaaaggaaagagtgacggcgaaccgttcctgtacctgcgccagcaacatgcccagcatcaatgaatgtccgccagcttcgaagaagttgtcgtcaatgcccaagccgtcaattcccagcaatgcttcacaaatcgccactaagccgcgctgcgttttgctctctggagccgcgtaaggcaccgaaaacgccggacgcggctgacggcgcaccgacggttcgctagggatgacacttcccgcgtccgccaccggcgttacggcgctcctctgttcttctggactgtcgacccagtaacggattttgtcaaaggcgtaggtcggtagagagacacggcgcggttgctcacctgcaaacgcagacaaatcgatgttatgccctcgcacccaaagcgctgccacggtatctaagatatgtttgtgctcatcgctgctgcgggcacctgctggcagcgagctgaacgcgagacgatcacctaatgcatgaccgttggtcagctgggtcagggtggcacctggcccgatttccagaaaatcgacatcaaatgtagcttgcgcctcttgcagtgcagcggagaactgcacaggcatcagcatctgttcaatccagtagtccggtgtggtgagagtgtcggcactgacgtgcgcgccggttacggtagagatgatggtgagcgtcggcgggttcagtcgtacattctcaaatgcctgacgtagcgcctgcgccgcatcttgcatcatgctagagtggaaggcatgagaggtatgcaatcgtttgttgatgatgttctgctccgtcagacgctggctgacggcgaggatctccgacgtaggcccggcgataaccgaatagtcaggggcgttaacagcggcaatcgccagcggggcggtaatcagtgcgcgaatctgtgcttcgggcagcgccaccatcaacatggcaccgcttggtgcctgatgcatcagctctgctcgacgcgccaccaagcgcaacgcatcctctaaagagaacacgcctgccaacgtcgctgccacccattcgcccagcgaatgaccaatcattaccgttggcgtgattccccaactgagccacaattgggctaaggcatactcgacgctgaacagcagcggttgtgtgaggcaggtttgcgcaaggcgttcgccttgggctaacgagacttctgctctgaacaactcatggcggatatccagttggtattcacgctcgagtaacgtcgcgcaacggtcgaaggcatcggcgtaggccggccaaacctgatagagctgatggcccatgcgctgatattggctaccctgcccggaaaacaacagccccagcccgagctgtgtctgcgctacaccacgagcaaacggcgctgtcgcggcctgctgcaacagcgtcccggcagcatgtagatctctggttacgagcgcggcgcgatgtgcgaaggctttacgtccctgtgagagtgtccacgccagatcccgcctatccggcagcgattcatgttgcagaaaatcggcaaaacgcgccagccccgaggataaggcactgtcggtcttggcagaaaacggcaaaatactgtaggcaggtacaggcgctcgcgcttgcaagtcaacggctggcgcttgttccagcacaacatgggcattggtgccgcccatgccaagcgaggtgacgcccgcgcgacggatgccgctttccggttgccacggttgacaggtagtgttgatgtaaaacggactattggtcagatcgatctgtgcattgggccgttcaaagtgcaatgttgcgggaattattccctgctgcactgccagcgcggtttttatcaaccctgcgacgcccgctgccgtatccaaatggccgatattggtttttaccgaccccagcgcacagtactgcttttgtgacgcgcccgcaaaggcttggcttagcgcagaaaactcaaccggatcgcccaaacgcgtaccggtaccgtgggcttccacataagtgatatcctgcggtgtcaaacctgccaaccgctgtgcctgagcaatggcgcgcgcttgggcatccacgctcggcgcggtataactgatcttctccgaaccgtcgttgttgacggcaaatcctttgatgaccgcatagatgttatcgccatcacgcagcgcttcatcaacacgctttaacaccaccagccccgcgccggtgccgggcacaaatccgctgctgttatcggaaaacgcccgacagtggccatcggcggcggtgatcccaccttcctgcgacaagtagccggtttttgctggtggccccagcgttactccgccagcaatcgccatgtcacactgccaagtcaacagactttggcatgccacgcacaccgccaccaaggatgtcgatgaggaagtctgcaccgtgatcgccgggccgcgcaggttgaggtgataggcgatggtagtagtgatactgtctttgtcgttaccaatggccgcctgcaaactgccagaagagaaaacgcgtttaaagtgcggcatcaagttcagcatcaaataggaatccatgcttttgccagcaaaaatacccacatcccccggataatcggcagccacatagcccgcatcttcgaaggctgcccacgcggtttccaacaggacacggtgctgaggatccatcagctccgcctctcggggtgcgataccgaagaaagcagcatcaaatttatcgatgtcagctacctcccctttggccttgacgtaatctgggtgctgaacaaattcaggactgattcccatcgccagcagttcctcatcgctgtaaaaggaaatgcactctcggcttgccagaagattttcccaaaacgcctgtaccgtatcggcttgagggaaacgccccgccatcccaatgatagctataccaaaatcattctctgccatgttgctttccccctatattcaggtttatcacgcgtttcattcagtggaatcagtgatgactgtcggttgtggctgcccagcgcgtgtgaccaaaggccaaacgctgcttcgccgcacgcagttgtgtctgatctcctgtggtcccttgcgctgcgtccggggccagcagaaattccgccaagcgtttgatggtagtgaagcgcagcaggtcaaccaacgccacgtgctgaccgcactgctgcccgatgtattgctgcatctgtactagcagaagtgagtgtccaccgagatcgaagaaatttgtggtggtgccgacacgctccaggccaagcaactgctgccagatctccgccagacgctgttccagttcggttgccggagggacatactcgcccggcccttccaactgccgcagatcgaccagcggcaggcactggggatcgattttgccgtttacacctagcggcatggcgctcagcggcacgtagagcaacggcagcatatgcaacggaagccgcaggctgagccatacgcgcaattgctgagcatccagcgcaacgccgttgacgctgcaatagaaggccactagtagcggcgttgccgccgcattgcgtcgcacatcgacccacgcatcagcaatatccggatgctgtttcagtaggctttcgatgtcgcccagttcaactcggtatccacggatctgcacttggcgatcttgtctgccgagatagaacaacatcccgtcggttgcccaacgagcacgatcgccagttttcagcacccgaacgccagggtattccggcaactcgacaaagcgctcgggatcctgtcgtgcatcaaggtagccgggcgaaatgcccagaccagagaaacagagttctccacaggcacctggcggtaccaaacgattatatgcatccaccacataagcttgggtgttctgaatcgggcggccaatgggcaatgctcccgtttcttgctccctacgctttgcgacaggaaagtaggtcgagcagataccgctttcggtcaggccataaccgttaaccactgccatgtgcggcagaagcggcgctatctgctcatactctaacgcttcaccaccgcacagaaacaagcgcagcgatcccatcgactgagccagcacagagaggctggcagaaagcgatggggtggtgctcaggatagtcacccgctgagatgccagcagcgcaatgagcgcatcactatccaaactctgcgctttttgcgccaatactaaggtaccgccagcggcgagcagcggcagtacctccccgacaaagctagcagacgcgactgaggtaatgggtagcagaacatcctgatgcgtcacttgatagctggatataaaggatgcggttaagttgaccagattacgttggctgagtcggacgcctttgggctgcccggtagtaccggaggtaaagatcaccaccgcatcgcaatctaaagcatctggcgcaacactaactggcaggttcggtatttctgtcagcaggctacgccagtcaggcactagcacccaaggtatcgtcagcccatgaggggattccagcggttgcgccaccagcagcatgcacggcgttgcctgcgccaagatcagggcattgcgggccgctggcgcgttaccatccagcggcacatagctcgcccccaaagagaggatcgccaattgtgcgataatcaattcgaaacaaaaaggcagttgcagtgcgacagattctccgcgttttacgccttgcgcacgcagccaagtacacatctgcatcgtggcctgttgcaattcgccataggtcatggcgtcgtcagcgtggcgcaaagccacctgtgtagggcgctgctggcagtgcggtaacactagcgccagcaggttatctacgggcggcagagcaacttcagtggcgttgtgccgcgccagccaagcgtgctctcgaggggtgaaacgaatcaaatcgcggactaactgcgtgggttggctgctggcctcatctagcagttctctccactgcgccaccaggtgctgaatacgatccgcactgtataacccagcgtcgtattcgaaagtgccggtgatgcgcccatcgatatgctgcatacttagcgaaatatccacctgagatgcactggtatccaacaataatggtgtaacgttgacaccgtttagtgtcgggctcgccagaggcatattgtcgagttggaacatgcactgatatattgggaaatgtccggcgctgcgatccacattcactgcgcgcactatgtcggtaaattcgagacgctggtgcctgaaagcggcaaacagaatacctctgatcgtctgtactaactcggaaaacgatgccgcttcgtcaagaggtaagcgcagcggtagtacgttgaccagcggcgcgatcatatgctcctgttctttcgtcagccgcgcagcaatcggcataccgacgatgtattcctgttgacgcgcattacgatgcagcaggaggacgaaggcggtcagcagatagttatacaacgacacgcgctgcgcacgcgccgccgccaacactcgctcgcatgtgttggcagacaatgcgaaggcaacaaacgcgccttggtaacgtgccaccttctgacgcggttgatcggtggggatatcaagaatcggcaacgtccccgccagggtattttgccagtaacgcatcgcgtcctgataggcgtcactctgacgccactcttcttggtactccatgtagtcggcatactccaacaacggttctggcgtcagcgattcaccgttatatgcggcctgcaattcgcgtaacaaaacgcctttcgaccagccatcactgatgatgtggtgcagatgaatcaacaatacgctacgatcgtcatcgagcgtcaacagttcaaaccggcacagcggtgtgcctgacgttaagggcatggggtgtgccgcacgctggttgatcatcgcctgtagcgcgttatcatcactcaccgaggggagtggcactatggtcagcaacgcctgcgacgatacgcactgaggcaccgccaatactggttgtccattgtgggtttccgccatagcacgtaacagagtatgccgactcatcaattgacgaatcgcgccgtccatccgcgtgcgatccagttctccttcaagcagcaaggcggtggggttattgtatagtgcagtatgcggcgccaattgttgcataaaccacatcgacgattgagccgatgacaacggtaggtagcgcacggcgggagtttcacgtaaatcgacgcgactggctgagtacgcccgcgccaagtcgagcaacgttttacgacagcacttgccattgtcggagagtggtaactctgacattgccaacaaacggttcggcagcatgtaggcaggcaagtttttggacagtgcgtccattaaggccgccaaattgagcggcacgctactgacgacaaaagcgtaaatcaactgattgtcgggatcatcctgatccgccaccacgactgcctgctgtacccccgggaaacgcatcgcatgggcttcgatttctcccaattcaacgcgcaaccctctaattttaatctgaaaatcattacggccaatgtaatgaatttgttggctttccccgtcgcgccacaccagatctccagttttatacagccgctccggtttccctaaatggcgcaaagttggatgtatagtaaaacagcgatcagttaacgccacgttgttgagatagccacgtgccagcccgataccagcgagatacagttcgccctcttcgccgtctgctaccggattaccatggtcatccagcacatagagtcggcaaccgtcaatcgcttgaccgatagggatatcgtcgtagtcgtacccgcgcaggcagcggtgatgactgacatcgattgctgcttcggtcgggccatagagatttataagatcaccctgcgccaccgattgataaaagcgagccacactgtggaccgtgagtttctcaccgctggaaaacactaatcgcaatgaggcggtcaaacgaggatcctgtttcatctccagatactcgacaaacaggttcagcatcgaagggacaaagtgcacaaccgacacgcggtgacgctgaatcagtcgagccaaggttcgcggatcgctctccagtccggacggtaacagcactacagatgcgccgtacatcgcccaccagaacatctcccagacagagacgtcaaaggtgtacaccgtcttctgaaacagcacgtcctgagaactgataggataagcgttctgcatccagacaattcggtttagcagcgctgcatgttccgtcgccacccctttagggacaccggtggaaccggaggtgtaaataatatacgccagttgccgcgcatgtggtcggtaacgcagatccgtcgttggcatggcactgaccgccgcgctgtcgatttcgacgcgaggaatcggccagcgatcaccatcgtcagtaccgatcagacaaacagcgccgctgttgctcagtatattttcaatgcggctacgcggtgcattgtacgccagcggtaaataggcaccaccagcttttacaatagcgaaaatggcaatcagcattgccatgccgcgcggcaggcggatagctaccacacgatcctcgccgatccccagcccacgcagataatgcgccagttggttagagcgtgcattaagatcgtgatagctcagcgccgcgtcccccatcaatacagcggctttttccccatattctccggcgatacgatacaaatagtcgactatcgtttggtcgtcggtaggcaactgtctcataatcccttgctgttccataactctggccttcaaagcgagataagtacgtaaaatggcgtgacgggttacgcctgtccgccgttgtcggaagccaaccgcgcgtggcaggcgtcgatttctgcctgactactgcctttgagttgaaatccctgttcaagaagctcatgcaaaaaagcaatgtcctcttcgctggatgtgccgcgctgctcaatctgctggatgcgctcaaaaaaacgactgagcaattctttcaattgcgcactggcagccacatcggcggcgcggtgatggcgtgtggctgtcagggcgttagtgagcagcgtgatgcgttggcggcgcacggcttccggatcggtcttcaccgccatgttatcccccagcaccaatgctagttgcgcacgatcatgacgattgtcaaatgcgtaaactggtgctggatagcgattctccagcagcaggtttttcagcacactttgcggaccgatctctatcgcgatcggtgacaagtgtcctgtcaggtaggtgagagagcgctgccactgcactggctgagagagctgttgttctagccactggactggcgtgaccgtatcgggatagggttgagcgttgacattggagatcactgggcagcacggacgtcgccattcgcagcgatccagcgccttgcgcaattgctgtccgcaaggtttcaatagtgggctgtggtaaggaacaccaccaatcagcggcactacttcgacttggcgatcatgatccagcaggtattgctcggcggcgataatggccgagttttgtccggataacataaactgttgcggcgaattgaagcaggcaataccgacctgctgtcgggtttcacgctccgccacctcgcacgccgctgccaccagtgcctgattcccttgcttgatgatggtggtactcgcgtccatttcgcgggcgatctcactggctaaacggctacgcatcgccaccagcgccagtgcttgggaaaagctcagcgcaccactacaggtcagcgcagcatattcgcccaaactatgacccaacatataacgtaggttgacatggacaccggtttgcgccaaaaactgctgccacgcgacaaagtgggccacgctggtggtatagatagccagcgccattgccgtcggctcagcaagttgtaccaaagtacccgacaggcacagcgctgccatgtcccgttccgtgatctggctagcttcatcaaacagagtacgcacctgcggataacgctcatacagccaccgtgccatgcctacatattgcgaaccggagccagggaacatcagtgcgacatccttcgtcatgcttcactccccatcatgtaattcatcgcaatttggatttcatgaatttgcgatgtcccttcgatgatttccatgattttggcgtcgcggtagtaacgttcgacggcataatcggcatggcaaccattcgcaccgagcagttgcaccgccttcccggccacgtccaccgcagctttggaagcgacatacttcgccatcaggatttggtttatcatggccgggtgcagcgtttcgcggtattccgccgcgctgaagcacattagttgcgcactgcgcgtttgggtcagcattgtggcaaacaagtgctgaacaatgccatgagaaaataaccgccgcttgaactgtttacgctggcggatgtagcgcgctgccacatccacagcggcccgacataatcctaggctgccacaagcggtggtgaaccgcccttcattgagcgcaaaattcaccgccagcggtaccccaggggtgagcggaccgagcaatgcatcctccttcaggcggcagtcattaaaatgcagctctgccaacatattgccgcgtaaccccaacatgtcgttgagtggagtgatagtaaagccgtcggtattgcgatcgataagcactgtcgctaattgattaccacagtggattaaaacaataaaaaaatcagcaatctgccctagcgtgatccatttctttttcccgttcagccgccaaccgtcgccatcctgctgtaattctgtttccacgttcactaagtcactgccgatattcggctctgtgagggcaatcgcgccgatcaattcccccgttgccagctttggcaaataatgggctttttgcgctgcgctgcccacgcgttgcagcagcgtgctgaccatgccagtcactgttatgagattttctaacgaaccgtgaaccccagccatcacttcatgcaaagcgcacagttgataagaatcgtaacctcgtccgccatatttttgggggattgacgcacctaagtacccggcctgcgccacgcaagaaataatgtctggcacaataaactgctgacgttcaatattctgtgcagccagggcgagatgttgtttggcaaacaggactgcctcttgctgagccagctcataattttcagtgcacatagtttactccaggcctgtttgtcgctgaatgagctccactattttattgacggtagcaatctgttctgttttcaactcactcacttccagctcaacctgaaaatttttttctataaacagtatgatttgcacagtaaataacgaatggacaagcccgagagaaaaaatatcgtcatcatcgttcaacgtatgcccacgtaatgagcgtgaaagaaattcccgaatggcggctttcatatcttgctttttcatattcatatccctatctggttaacccagaatcactgctcggcgtacgtctgttgatagcgataaaacccctgccctgatttcacgcccaaataccctgcatcgaccattttctttaataaaaagctggggcgatacttatcatcattaaaactttcatatagcacctgcaacgattgcaaaatcgtatccaagccaatcaaatcggcagtttgtagtggccccatcttgtgcccgaagcaggttttaaacaacgtatcgatatcctcagcacgggcgatctgctcctgcaccataaatatggcttcgttaacaaaaatcatcatggcacgattagtgacaaagcccggagaatcattgaccacgatgccggttttattcaactgagcaaataagtggtgaaatatgttcagtgtacgctctgcagtatgtacaccacggattaattcgacggtgtgcatcagcggtaccgggttcataaaatggacgccgactacattctccggatgtcgcattaattttgacaacgcagtgatagatatggcggacgtattaacaccaaacactgtcgacgcgccgcagatcgtattcatccgtgtgtatagtgcattttttttctctatatcctcagtaatattctcaatcaccaaatcacattctacaatgtcgtccaactcagttgtgaaacggatattttccattatctccgctgtgctatgcgtcttttttttatgctgcgggtgaaaattatataagcgtaagttcgcttcgatcatctgtcggcatttatccaactgagattgagaaatatccacaacgttagttgatatgccgtattgcgccatgttatgagcgacgccagttcccattactcctgcacctattaccgccacgttcatcattgagctcctttactgacaggctatttcgaggttgtcttcgccccccagttgcgccgcgatatgcgcgtagatattgcgcggattggggttttccatcagggtcaaaagatcgatatgtacgttgaaatcgcgttctaaacgggaggtcaattgcgtcaccagcagcgaatgcccgcctaattcaaaaaagtcgtcgtccaccccgaccggcgatatttccagcaacagttccatcagacctgtgatatactgcataccccgcgagtgtgcggctacgaaaggtacgcttaacacgggacgtgcctgataagggtggtgcgtttcgggtcctgcttcgggttgggtctccacactacccattacccgtccaggcaatgggtagtggttgtgtgcgaagggatatgctgatgcgctcccgcgttgcggcagcggagtgccgtaccacacggcccaatccacattgatacctgcacaccacagttgcgccacgtagcgcaatacatcaacgtcttctcttatttccggcggcagcctaacccagttgatactgtgaacgccctcccccagttctcgggtatctgccaacagcgcttcactccaaaaccctctgtcgttacgctgtgcatcggtgatgggatttccttgccaagccagcacgtagccggggataggttcatggcgctcaggaagccagagatgaagcgccttttgctccatttcccacagcaaatgcaacacgtcttgcgtcgcaatcatgccactggctgcagcggcaggcaaaaggcctgttccagcacccgacagcagtgttaatgtcggtagcaggttcatccaggtttttagcgcggcgatagtctggcagcctctgattagcaggctgctgttcgcttgtgccgcccacgtttcagcgtggcaataagcgggtggaatattcatgccgtcgagtaatgccgtcagagcagtcgcttcgcgttgataatgtgccgaatgcgccagccactgtgcgtaagtacaatcgttcgtagtacgtagatctggacagtgtaggccccaaggagcgtcgggcattaggttatccagcgatgccagcatcgcttgcgtaccatcgttttccacttgtatcactcggcggcaatcaaacacggggcgcgccacttgttgtgtgtaggctagcgttgacgcatcaagggtagccagcaacggggtaagctgttgcgtcagctcatccaactgctcgaaagacggcgcggagagagggataaacaccggtgctcgcacttggtcatggtcatcgcgcaccgcaggattcagcccttccaaaatcatatgcacattagtaccgccaatgccaaaagaactgacgccagcgcggggcggcatccgcgatgcgggccactcctgcggctgtatcgggatataaaacggtgaatgcgccagatccagcttcgagttaggcatttgatagttggcgagcggcggaatggtccggtgatgaagtaccagcgccgtcttgattaacccagccacgcccgccgccgcgtgggtgtggccaatattcgcctttacagcccctagtgcacagtattggcggtgtgaagtatcgaacgcctccgtcaacgcagcgaactcgataggatcgccaatacgggtgccggtaccgtgggtttcaacgtagccgatgctttctgggcttacttctgccagatgacaggccgcacaaatgaccgccttctgtccctcatgaccaggcgcgacaaaaccgattttttgtttaccgtcattgttgaccgcgctaccccggatcaccgcatagatgcgatcgcccgctgccagagcatcttccaaacgccgaagcacaaccacacccgcgccatcgccaaacagggtgccagaagcctgactgtcaaaaggacggcagtggccatcggtggagtggatcatgccctgttgacagaagtagcctgacttctgcggtaaatcgatagtaattccacccgccaacgccagatcacattcgccaaacaacaagctgcggcaagcgatatgcgttgcactcagagaagtcgaacaactggtgtagagactatacaccggaccgttgagattgagactgtaggcaatgagatgtgcgagcagatccttatgaccatagatgccagactcaaaacgattcagcgcatcgccgccaatctgtgacagcgaacgccgtagccaatccacatcttctgacgcccccacgaataccccggtgatcagatcgctggtacgttgggcatagcctgcatcttccagcgcatggtaggcaacttcatgtaatacgcgggatttcggatccagagtctgcgcctctttgtgactgtaaccgaaaaatgcagcatcaaagtcgcatatgccctcgatatagggcttggcccgtacataggccgggttgtccagagtactctgttcgacgccttcggccagcaactcctcctcgctaaagaaggtgacgcactctttaccctgaacgatgttatgccagaattcgtgtaacgtccgggactgcgggaaacggaccgccataccaataatggcgatttccatgccgttcatttcgcttgcgtattccataaacttcattacctttcttcagggcgaggaggcgcccggattaatgcaaagacgtgtgactgcgcgcagtatttttcgcaatttgcaaagcacgttttgctatctgattcgcgcgcgtattcgtctgtactgcaggctgtggtgatggcgcatttgactcgccctccgggggctggcaaaacgtcgccagctggcgcacggtggcgtggttgtacagcgacaccacgctcacttgcggatagtgacgcgccatttgcccactcagttgcaccatatcgagtgaggttgcccctaattcggcatagttgtcgtcaatgcctactctatccagacccagatactcttccaggatttggcagagcacgcgttccacttcacgtgtcgcggggctgtaaggcacgccaatttccggacggggccgctttttcactgtctgctgagtaatcgtatcgttagcggcagacggtacaccgcgatccacccggttgccccgcgctaatctatcgatcgcccgaggtgagagcagcagttgcgcccacggactgcgagtgttcagtatcggccacaattggcgcatcacctcggcattgctcatgctgagcgcatagccgccgaggcgcctttctgctatcatggcgttcagccggtccatgcctgccgcagtgcgatgcgttaccaccaccttgccaatatgctgcggcgtggtcagggtggcgaaggcgcgtgcaacctcgggcaatggtacggatttgcatggaaggagcggtagcgtgttatcatctatccaagcgacaatctgttgcaggtagcgactaaacgcaccatgcgccgcgtgaaaattaatcggaataaaggtgccgccttgggcgaagaaacgcatcggtagcgctttgtcttccacaatgtccttgctgcccagctcaagaaaacggcccagcggtgccagcagcgcgaggctagcgtcaagcagacggcctgtgagggagttaaggatcacatccatcccctgtccgtccgatgcggtcagcagagtggcagcgaactgttcgtcgtgtgaatcagctacggcatgtacgcctagcgaaagcaagtaatcgcgtttctgctcgctacctgctgtggcgaaaatctgtgctccgcagcgtttggcaatatgtagcgcagccaagccaacgccccccgccgcactgtggatcaatactcgttctccgggttgcaaattagcgcgcaccaccagtgcgtaataggcggtgaggtatgcgataggcagcgcagccgcctgttcgatgcgacaatgggctggttttctcactacgcaatcgctttctacccgtgcgtactggacaaaaccaccgtttagcaccgccataacatcctctcccggggcaaattcagtgacatttttacccacgcgagtaatgcgtccggcgcactccagtcccaattgcagcggagcctcacccggctgctgccggagcaatcccgtggtgaacagcacatccttaaagttcagtccggtggccagtacctcaatctctacttgtgaatcccccagcgctaagcgcggcgtagggcacaacgctagctttcctgccccctccccctcagcggccagccgcagttggtagttatcggcactgggcacgcgcagtcgcgtgtcgtcatcgacatcttgtatgtggagctgtaccttgcgcttcaccattgccgcacagcgggcaaccatctcgcctgccatgtcgtagagcgtgaaagcgtagctgtcaccctcctcatcgtgccgattgacagtcagcgccacatgtaaggtgttcggcaacgggcggtacaggcgtaaatcctgataaaggaaaggtaccgaatcagtatgaaaaccaggcagttgttcgacaacactgctggcgatgtccaacagcgcagggtgcagtgcgatcgtatcattagcggcaacggtgggcagggccagcgttgcgaaaacctgagtctgggcggtattgccatacagttgttgtacgctgtgccagcgcggcccatagtggaagtgcgtgctcgataattcctttgttggaggagtgatagtgtgcatctcgcgcatcagccccgtgagatcgcacacaacattatcgtctaccatcagacgcgtcgccctgcctctggcatgggttgttaacgtgccactaaagcgctccgtcattgatttcacctcgacactaactccttgcccgttaggtgaaatgtcaacaaaaacgtcaacactgcagttgtccatcacagtcaacggtgccaaaaagaccaattcatcaatgcagatttggtcttgcacaaagtaatggcgcagagcttcatacgccagcgccagatagccggttcccggcagcgtggcgataccggatatccggtgctcatccagcagccaatcggactcgggggataatcgcgcgtagtagctggtgtcagccccttgttgtttataagcctgtagcaacgttcccgtcatcaatgggcgcagtccacgcaagacatcgtattcactgccgtttatagcatccaacaacatgccctgctcacgcaatgcatccaacccgatactgagcgcattcaccttgtagcgggtacgcagttgctgtgccagtgcatccaaataggcgctggcggtagcatagcctgtctggccgatctccgcattcacggcagccaacgagttacagaacagcagtagcagacgctcatccagcagattccgttgcgctaacgcatgcagcacattagcagtaccccgttctttcaccgttagcgtgtcgcgtagcgcagattcgctcaattgatgcagtgtcaatgtggtggtagcgtcggcagcaaaaatcacgccatccaaccgtccatagcgttcgagcagagttgccagacaagctctaaccgcctccgcctgcgtcacgtcgcagtggataacgtctaatgcgtcctgctgcaccgcttcatggtgataacctgtgcggctgctcagtaccacacggactccctcacgctgagcaagcgcttcgccgatcatgcggccaatccccttttcaccgccgataatccacagtacgttgcccggtatacaccctgtttgagggggtaagtgcgccaacagccgtgtcgggataaagcgtcgcaggtaaagcatcccctgcctgagcgccattaccgtttcttgtttcggggccagacgctgggttagcaagttcagattctcatcactgctctgcgcatcgatatcgatcaatcgtacttcggtcgggtgcagctcttgggcaaacacgtttactgcgcccgacaacgctgccagcgtcggttcgggattatcctcttcctgtacgcgaaacgcaccatgggtcaatactgttaaggacgccagcggcgtggtgctgtgcatacaccagcgagcaacacgataaagtcccgagagcgactgtgtcaacgatgatcctgcctccgcaccgggagcatacaagcaatgtaactgtcggtaggttttgtgtgctaaaagtgcgcagatgtcgtggaaatgcgtcagaatacggtcattatcccacacgtcgtcctctgacgatatcggcagcggcattgtgatgctgtcgacaccactactcatcagcgtctgctgtaacttgtcgccgtcagcactaataatgatgatcaattcgcccggcgcatagaacgcctcccgcaaggatgtgtcgtgcatccgccacagcacacgctggagccactcatcttgcggacggcgcagaggatttggatactggcgataaccggaaagtgcagcaccatagcgatagtaataagtctgttcgaaggggtaatccggcaatggaatgtgcttgccgagtgccgtctggttaaagcgtctccaatcaatattctcccccctgacccacagcgccgccagcgtacgatgcaacatgtgctcatcatcgatcgccgcgttggctttgcgtagcgtcaacagggtcggctgatcgctgtattggttatgtccttgaataaaggtagagagcgtattacccgggcccacattcgataaacagcgtgggttgtaccaacagttgcgccgcaccttcgctaaacagcaccgcgttgcgcacttgctgcacccagtaatccggcgaggtagcttgctcctcagtaatccatgtaccgcttacattagatataaagcgcttgtgcggcgcgtgcatcgggatttgccccagcaactgtgcaaaatcgtgcagcatcggcgtcatcatggccgagtggaatgcgtgagaggttttcaggcgcctgtgctgtatcccgccctcgactaagcgtgtgctcaaacgggaaatggccgcctgctcgcccgcgactacgcaaaaatgcgcgctattattagctgccagttcaataccccgttctgcagctagccatggggtcaactgttcgcgactaaggtagaccgccatcatgctaccgggacgcatggactgcatcaaacgtccgcgcgcctcaatgacgtgcagcgcatcctcaagagtaaatacgccagcaatacaggccgcaacatactcgcccagactgtgcccgatcatactgtccggcgtaatccccagatcaatcaaggtgcgcgctaggctgtattcgacacagaacaacgccggttgtgtgaactgcgtttgatcaatatcccgcgtatcctcatcgtcaaacaacaacgccttgagatcgaccgtcgaatagcgttggaatgcagcaaagcagcgatccatgtgctggcgaaacatgggttgatgagcatagagcgcgctggccatgccgtgatattggctaccttgaccaggaaacatgaagcagatctccgctgtcgtgcgctgaccattgaagatttccgcttgcaatatcgtggcacaggagagatcgattttcgacccacgactcaccaaataagcccgccgatggtcaaaggctgtgcgtccagtttgcaatgtataagccacatccggcaggcgcacccctactccatgcttgacatattccagtgtggaggccacgcgcaactctaacgcagcgggtgttttagcggagaacaacaacagatagctgtcgcgtacccccgtcgctgaagggtcgtcctcatgttgatgtgcttctagtgcgatgctggcattggtgccgccgatgccgaaggagctcaccagtgcacgacgaggacgcgtcgacggccacggttggacttgctggttaacgtacaatgcagaacgcgatagatctatagcaggattgagttggcgaaagtgcgctgttggtggcaacacttgatgatgcagggcgagcgttgttttgatgacgcccgccactcccgcagcggagttgaggtggccaatattacttttcagcgctgaaaccacacaaaacggaacaggtgttgggccaaacacctcattaagcgcacgtaactcaataggatcacccagcaccgtaccggtgccgtgcgcttccaccaatccgatactgtcgctatcaaaaccggcacggcgcaaactggtgcggattaccgttgattgcccgatcacactcggcgcggtatagccgattttgttattgccatcattattgaccgccgaacctttgatcacaccatagatgcagtcccgatccgccagcgcgtcgtccagacgttttagcagcagcattcctaagccatcaccggtgactgtgccagaggcttggctatcgaaaggacgacagacaccatctcgcgcattgatcatgccttcatgatattcatagccccggtacgcaggcatctcgatagaaacgccgcccgccaatgccgcatcgcaatcccggttacgtagtgcgatgcaggcctggtggatagccactgccgaagtggagcaggcggtgtcaagcgtcacggcagggccggtgaggttaagcgcatgggcaatcaatgctgtgacggaatggatattcaggatactggccttgtacagggcggtagagtcggtagtgtcttgcattaccgcattaagccagtggggggatgtcagcagtccggcataaatgccaatcgcaccagtaaaggtggcaggatcgcacccagcgtgttccagagtttgccagcagcactgatgcaataagcgaatttgcggatccatacattccgcctcgttgggagtataaccaaagaaatccgcatcaaaccattcgtgatcatcaacaatccctttggtttttatataattcgcttgtttaagcgtgtcaggtgtcacaccatgcgcgcgcaactcttcatcactgaacagtgttaatcccgattcccctcctacaaccagcgtccacaacgctgcaatattcgccgcaccggggaaacgtcccgccataccgacaatcgccaccggcatgtcgctgtagacaacagcacgcgttggaattgcatcctccggcgatacggcagtatcgagaaaatgtgctaacgccgtgagcgttgggtacttaaagagatcggtaatatcaatctccaagccaagttgccgcttaatatcccctttaaccctgatggtatccaatgaggtgccaccgagggcgaaaaaggaggcattgctatcaatgtcttgtctatcaagtacgcgttgccagatagcatgcagcgcatgttccatgtcactatgcacctctgatatcgtggtggacacggcgttgcactgagttgcgggcaggagataccgcaactgcgccaagtcggccttgccactatggctttttgcaatctccgtcaccaccaccaaggattccggaatagcgaatggcggcaatctgtcagccaattgccctcgaacttccacctcatcatagctatcattgacgcagaccactgccgcaatatgcagcgtttcacgtacgcggtaaggaaccactaccgcctcgataatgccggagcactccagcaggcgctgctcgatctctccggtttcaattcgttgtccattgatcttaatttgaccgtctttacgcccaaaacagtcaacacagccatcatccagcaaccgggcataatcgccagttttgtacatcataccgccgggaataaaaggatcagggacaaaaaccgtcgcacttagcgccgggttgttctgatagccgatggcgacccccactccacccgccactagttcaccggtggcaccgataggcaacaaatgcccatggagatcggtaatgtagagcgaggtgcccggtaccgcgtatcctatcgggactcgggcgggttgcaacccgttgaaacgatatgcggtggtaaaaatagtgttttccgtcggcccataaccgtttgtcaccaccagatgcgggtatttttgcatcacgtcgttgacatgccacgcagatactgcttcgccgcccaccgtaatgtgttgtaacataccgaagaaatcggcaccttctgccacataggagttaaacaaggatgaggtaaaccaggcgcgcgccacctgttcatcagcgatcgtgcggcgaatgtgattgatatcaagtaatgcctgtttgctgagtaatactagtttgccgtggttgagcaaggtagaccacatctcaaacaccgaaacatcaaactcaaatgggcaggtcagcagcgttgtctcaccgctctccaccttcagcgggctgtcgccttgtatcaggcgcaataaaccgcggtgcgccaccgcgataccttttggcttacccgtcgaccccgatgaataaatcacataagcgcgagaatctggtgtgataaccggaaataccaccgagggcgcgacgggaaatgcacagaggtcactctgcgcaacgtttaatgcatctagcggtttgccatgtaccagcaacagcgccaagccgctgtcatcaataatttcctgcatcctacccactgggtagtcggggctgatgggcacataagcagccccgatcaacatgatggcgatgatggcaaccacggtgtttacccggcgttcgctaattatgcctacagtatcgccaaccataacaccctgctgtaccaaataagccgcgagctgctcagcttgtgctgccaactccgaataggtcaacgcgcacaattcatcaaccactgcgacctgtgctggcgaagtcgcagcaacttgatgaaattgttcgatgacgttggattgactatcccaatcccggcatgccatgcgttccagatagggttgaagtacctgcgcctgctggcatggggacaagtttaccaacgcagcaatggggcgctgcggattgtccaccagttgttcaagcagataactcaggtgcatcagcaacgcttgcgccatgttgttggtcaggtagttaagggcatatgcaatactgaaacggaatcccttctgttgagtgatggtcaaggtcagcggatagtgcgtttgttcatgtacactgagatggcgaattgccacgggcgacgcgcatgacaataatgtcatatcaacgggataattctccaacaccactaaggtattaaaaagatccccagcatgaccttctttatgtaccaaccgttgtatgctggctaaggcatcatgttcattgctgtagtgagctattagtgtttggtgcatacgttgtaagtgttgcaacagtgtcgccccatcatcacgcagacgcagcggcaacgtgttaataaatagccctagtgtttcttctataccatcaattggtatatttcgccctgatattgtcgcgccgaataacacatcgtcagcatagcaccaacgttgtagcaggatgccccaggccacatagaagattactgcgggggtgatacgataatcgctgcatagcgtctgtattttctgacacacatccggagacaaattgatctccacatgatttgtttgattaacgtaagaattgttctcggcttcagtatctgtgtgatattgtgacagcggcacgatacaagttggtgttccctcccgaagatatgcagcccaatagtcgtgctgaaaggtgtgacgtcgggccgacagtgtgtctacaaggggtttcagagatgaggggataatggcgctatcatccctcacaccactgaccacagccgctccatagagttggagcaactgtttaatgaaaagggataagctccagccatccatcacaatatgatggtatgatagtataaaagcactttctttcgttgactgaataaggtaggcccggactgggatcgttttcaaggaaaatgggtattttaaatcagcctgtagcagttgaggaattatagcatcaataccgtcatcctgcgggacaggaatgataatgtcatcattagctagtagaaaacgtatttcctcttgctcacagtctaacacatatatatccggcaacacatcggtcttcaccacctgacaagggcgctcatcaatctcccagttataatcagtgcgaaaacactcatgctttcgaaataacgtttccagcgcccacttgaagtgggcgctatctacatgctgagaaaaaatgcatgtaaaatgctcatggtagttactccttttcttatcctttaaggaatggaataaaaacccctgttgacttggtgttagcggtaactgcttacgcgtgtccatcttattacatggaaaatctccagaggtattatccataaccatcaccttattatcggatttatagattatttaacatgattattctaaatggcacacctatccgcaagtatagttttttattgcgtattcatataatcatattgcattttatcacttacaggaatacccccaaaaaatccttatattctgattacatgtttttcttcaatgaattagattctgtctgtaagcaaaaacatgtaagtcatgcagtacatacatgatgtagcgggtatgaattgatacagccaccacatagaaaataatgcgtaattcccatttacataaaaaccgttgtatcgtaaattcctcttaaatactgccaaaacaacagatacacagatacacagatacacagatacacagatacacagatacacagatacacagatacacagatacacagataccattcaggatggggggaaacatggataagttcaaagaaaaaaacccgttatctctgcgtgaaagacaagtattgcgcatgctggcacaaggtgatgagtactctcaaatatcacataatcttaacatatcaataaacacagtaaagtttcatgtgaaaaacatcaaacataaaatacaagctcggaatacgaatcacgctatacacattgctaacaggaatgagattatctaaatgaggattgatatattaattggacatactagtttttttcatcaaaccagtagagataacttccttcactatctcaatgaggaagaaataaaacgctatgatcagtttcattttgtgagtgataaagaactctatattttaagccgtatcctgctcaaaacagcactaaaaagatatcaacctgatgtctcattacaatcatggcaatttagtacgtgcaaatatggcaaaccatttatagtttttcctcagttggcaaaaaagattttttttaacctttcccatactatagatacagtagccgttgctattagttctcactgcgagcttggtgtcgatattgaacaaataagagatttagacaactcttatctgaatatcagtcagcatttttttactccacaggaagctactaacatagtttcacttcctcgttatgaaggtcaattacttttttggaaaatgtggacgctcaaagaagcttacatcaaatatcgaggtaaaggcctatctttaggactggattgtattgaatttcatttaacaaataaaaaactaacttcaaaatatagaggttcacctgtttatttctctcaatggaaaatatgtaactcatttctcgcattagcctctccactcatcacccctaaaataactattgagctatttcctatgcagtcccaactttatcaccacgactatcagctaattcattcgtcaaatgggcagaattgaatcgccacggataatctagacacttctgagccgtcgataatattgattttcatattccgtcggtggtgtaagtatcccgcataatcgtgccattcacatttagagatcatccggcataatcaatctgccaacgaaggagagcgctatgcgtaaagcccgttttactgagcatcagatcatcgccgtgattaagtcggttgaagccggacgaactgttaaagatgtctgtcgcgaggccggaatctctgaagccacctattacaactggaagtccaaatacggcggcatggaggcttctgatattaagaaaatcaaggatcttgaggacgagaaccgccgtctaaaacaaatgtttgccgacctgagtctggagaaccgggcgctgaaagacgttatcgaaaaaaagctttaaaaccagcctttaagcgtgagctggttactcatctgataacgacgttcgaactcagtatccgtcaggcctgccggagtctgaacctgagctggtctgtcgattttatgcatgatgccctggtctgtggccgtcgttttcgcatgttcaatgtcgttgatgattttaaccgtgaggcattgtcgattgaaatcgatctgaatctgccagctcagcgagtggtccgtgtactcgacaggatcgcggcaaaccgtggctatccggccatgcttcgtctggataacggcccggaatttatctccctggcactggctgaatgggcagagaaacatgcaataaaactggagtttatccagccgggtaagccgacgcagaacgctttcattgagcgctttaaccggacataccgaacagaaatactcgatttttatctgttcagaacgctgaatgaagtacgggaaatcactgaaaaatggttatcaaaatataactgtgaacgcccgcatgaatcgctgaataatatgacaccggaggaataccgacagcgccattatttggccgggatctcaaaaagtgtatggaactaaaatgggtctatttacactgctgctacgataatgcctgcgtggaaagcttctttcattcactgaaagtggaatgtctccatggagaacactttatcagccgggaaataatgcgggcaacggtgtttaattatatcgaatgtgattacagtcgctggcgacggcacagttggtgtggcggtctcactccggaacaatttgaaaaccagaacctcgcttagagcagtgtccatattacgagggtaggatcagtcgtttctttcgcggtaactttatatgatcgctgtgtaccagcatcgagagaagaaattcaggatgtattcaacactgagttcacaagctctgtagctattaagtcagtattatttacgtttacgatacatgttattatcgcaggatctttatcttggtagtgatactgcgagtggatacacccccactcagtatcttctataactatggcttttggttcttcaggcatcataccttccataacacgttcttgatggatacgtaacttgtagtacttctctggagatgaagaaatttcaacgagtacagattgtagatgtacgaagcctagaaatttaaaacactcggattttgtagaggattttaatgataaagtccagataacaaacacgttattggaaccatcaccataatttttagtgtcaatcttatctaccagctcctcgttgattaacatagactgatttagcaacttccgcttcacgccctgagcggactgttatcgctctttagacacagttccactaggggagaggatcagcgcttcccacgtagggacactatagtaactatcaccacatgcagtagggaagctcaaaccaaatttatgtagccagctcctattggtggtcattctggtggtcttgacaggaagataactctggtttagcttacttattagccacttactggcaaaggcgatcccagtcagaggagccaaattcaaaaaagcctgctttcgagcaggctttttactttctaattaccaacgctcttaaaacatctgtcttgaaccagaactaatttgcacaggcattcccgatcgatgttgcaacgcagcatttgcgcgatttacatcaacttcttgcccgttgataaacgcccgcaaagatggggttaccggcaatggcacttttcggtcagactcatattctgcacgattgcgcgacagcggctcatgaacttccagccactttgaaccatccggttccgttgtgtatttcactggctgatcaataatttgtacacgagtgcctacaggaacattatcaaacagatatttgatatcgtcattacgcagacgaatacagccctgacttacacggagcccaataccaaaattggcattggtaccgtggatggcatacaacttgccaatataaatcgcgtacagccccatggggttatcgggccccgcaggaacaaatgcgggcaaactctcccctcgtttcgcatattcgcgccgggtgttcggcgttggcgtccaggttggtgcttcttgtttacgttcaacggtagtcacccagttacgcggggtttctcgcccagcctggccgataccaataggaaagacttccactgtattactgtctggcggatagtaataaagacgcatttcagcgacgttaaccacaatccctttacgaacagtggcgggcaaaatcagttgctgcggaatggtgagttgtgagccaggcttcggcaaaaaaacatcagcgcccggattcgcttccagcatattacttaacccttgcccgtattgtgcggcaaaagtctccagcggctgagtattgtgatcaggaacagttacagtaagcgactgccccactaaacggctaccctctggaggtaatggataagttaccgccaggctattttggctggcaaaaagcagagcaaatgagcaaagaatatttacacgacgcatcatgtccctttcctaagtcgcgaatactatccgataagtatagcttttatcagacttttcgtttttagctgttcaaatcagaagtcgtattccccggtagaacaatattactggcagcaagttcgcccatgttgttgtatatcgcacaagcagcttcgatgatggacatcgccagagctgcaccactcccctcacctaaacgcatatccatattgagataaggctccagccccaaatgcgagagcgctatacgcgcgcctttttctgccgacaagtgagaaggaatgagatacggtttgattgcaggagacatctggcaggctgcgagcgcagcagcataagaaagaaatccatccagcaacacgggtaaaccgcaggaagcagcacctaacatcactccagctattccgaccaaatcaaatccacccacttttgccaggacatcaacaccatcctgaggatttggttgattcaacgtaatcgcccgacgcacaacatcaattttattagccagtttatctgtcggcaggtttgcgccaatcccaaccacttcttcaggatcccggccagtgattgtgctgactattgccgctgccggtgtcgtgtttgccatccccagttcacctacaccaaacagcgtgacaccgttttttgccagctcccgcgtataacatatgacgtccaaaagcaacttttcagcctgacggcgactcattgccggagctgaagcaatattgccgctacctcgtgcgacacgcatgttgataagcccggggataggctcagcagtatcaataccaacatcaattacgtggacgttagcgcccgcttgtgctgccagcacacacacgccggttgttccacgggtcatattttcagcctgtatggctgtcacttcttttggagaaatagcgaccccttcctcccagacgccgtgatcggcacacataaccagtactgcttttttgcccacatgcggtatgccattcaaccccggcattcctgccagttgtatggcaagcgcctccagctttcccaggctaccaacaggtttgagtaacccgtcaacatgccgttgtgcacgcgacatagcggcagaattgatggctgggatcgtattcagtaaatcggcaagtatttgcatgtcacgtctctttatagcagtgccagcaggaaaaccagttcaccaaactctatggctgctcccagcgtatcgcccgtttgcccgcccagcgtacgtttgagaagctgaccgaggatgaaaatcgccaccatcgtcaccaccatagcagccacaccatgcatacccggcaataatacggcagcaaaaatagcggctaagccgagtgtgacgcaggtttgtcgcccatcaattttgccaatgaacacattgccaagcccttcttcccgcgcataacgatgacgatacatcaataatgcggcagtcccgcggctgaccgcacatgctgccgccagcgatgcaaggatcggttcgccacgcagagccaactcgcttaacaccagaatctttgccagtaccacaaaaatcaatgccagaccgccgtgggtgcctaaacggctatcacgcatgatttccaacatgcgatcgcggctacgtgcagaaaatacgccatcacaggtatcagcgaggccgtccagatggaatcccccggtcatcagcgccagcacaagtacgctaaacagtgccgccagtggtacgccacaccatgcctgcagcaccatgaagaccagcccgctaatcgcgccaagcaataatccaatcaaaggaaaagtaataataccgcgagaataatgctcgaaatccagtccctgggaccagcgacgcggtacaggcagacgcgtaataaatgagagcatcgcccaaaataatttactcatttgatttttactccaatacccgaaaccaccagccatacttcatttgccgcagcggccaactgctgatttacccgcccggcaatatcacgaaaatgtcgtgccagacgactctccggcacaatccccattcccacttcgttagtcactaatacaacctttgcggggcaacgttggcaggcagcaatcaacgactgaatctcagcattaatcgcctgttccatcgcctgataatcccattcatcagggtctttatcgccgccataatcaaacaacagattagtcaccattgtggtaacgcattccagcaacacagcctcattcgggttaatgtctgcatgaattaattcatcaagatgttgccagcgctccactgtgcgccagtgctccgggcggctttgccgatgatgttctatccgtgcagccatctcatcatcaaggatttgcgaggtagcgatatacagaacctgtgaagagtccccaataagcacctctgcgtggcgactcttcccgctccgtgcgcctcccgtcaccaaaatcatcataccgactcctgattcaaatgtatgatggtattcattgaacagagcaatggatcccccaccgttgctgaccgcaaaacatttacgcgattaatactgcgcgtaatataattaaaaatccagcattctcaatccattacgaaataagatggcattacggaatagccagactttctcgtgttaacgtccgacaaaatgcgtcattgacagcggtttctgtggattgacacatttcattcagataatgaattaatgctactgccggaccaaccagcaaacgggcattgtgttctgaaatccaggctattgattcaacgtcagcgacagatctgcgctgtaaaagaagttgtaaaacaacgcaataaaattatccggaatggtggcgactatgcactagaacaccacaatttcgctctctcggtaaggcactgtcacagcattcaacagaatgtgacttgccagatttattagcgccaccagatgtttaaccgggtaaccacgacccagtcggggatatattccatcttctcgctgacatcatcaagaataaaaaggtttatcacactcagagcaacgttcttcagcaggcgggataattcttcaacatttaaaagatgtgttattaaaggcatacaaactggacgtattgtattttcttttggtggttgacctaaggtagcagtttatcctgatgcgctgagatttctgtaatatctacgtcaacattctcctcgaatagaaaatgcagcctcggcaagtgattcacattttttaacaaagcgttgttagcgtgccattttcagaagctctccaagaaagcgaattcttttctcaaattctgcattctcagacacagctttctactccatggcaatggcccaaatacgaagttgctcaggatcattagtggtgctgagaagttaaataaccatgcggagtaccactcgtcatcacgtatttatatatcatgaagctattgttgtgttttgtacatcagtagatgtattctgatatactcctttttctagacataacctttcacctgcttgcaaagcttctgtgttctgacattgccaaattgttgcaattctgtatccagccttctttcagtcatagcttcgggccgcgataagactcactgatctgaccctgattcctcttgcagactttatagaccaattaaaatgcagtttctgcaggtcaacgtctgaccatcattgtcatcactctggccattagagtaaccttctgcattcatccttttgtaaaaagtttatgtcagtatcagcaattaaccggacctgatactgatatgagtcttaccgcatatacggtcaatttcagcaattaattacattatccacgccaaagtgtttgtcatcgcaatgatggtaccttctttcagacaccattttttcaactccgttttccacggaccgcactcttatgtcaagagtgcggtccgtggatacaaccagagaccgactgacacgagtcagaggaaacgacggatatgttcagtcgtaaaatatctatcaaaaaacatgattaaggtcaaaaatgtttgatatttacaatttatgaagatgacaataatcacagatacatgagaacataaatgataataattatcattacagcaatcatttgtactttgtattaatgagggatgaaatgttatataatataccttgtcgaatttatatcctttccactctgtcattatgcatttctgggatagtttctactgcaaccgcaacttcttcagaaacaaaaatcagcaacgaagagacgctcgtcgtgaccacgaatcgttcggcaagcaacctttgggaaagcccggcgactatacaggttattgaccaacaaacattgcagaactccaccaatgcctccatagccgataatttgcaggacatccccggagtagagataacagacaactccttggcaggccgtaaacaaatccgcattcgtggcgaagcatcctcccgtgttttaattctcattgatggtcaggaggtaacttatcagcgcgccggagataattatggtgtgggactgttgatagatgagtctgcgctggagcgtgttgaggtagtgaaaggtccatattccgtactgtacggttcacaggcaattggcggtattgttaacttcataaccaaaaagggaggtgacaaacttgcatctggagttgtgaaagctgtttataattccgcaacagcaggctgggaagaatcaatcgcggtccaggggagcatcggtggatttgattatcgcatcaacggtagttattctgatcagggcaatcgtgatacgccggatggacgtctgccgaataccaactatcgtaacaatagtcagggtgtatggttgggttataactccggaaaccatcgttttggcctctcgcttgatcgctacagactcgcgacgcaaacttactatgaggatccagacggaagctatgaggcatttagtgtcaaaatacctaaacttgaacgagagaaagttggggtattctatgacacagacgtggacggtgactatctaaaaaaaattcatttcgacgcgtatgagcagaccatccagcgccaatttgccaacgaagtaaaaacgacacagcctgttcccagtccgatgattcaggctctgaccgttcataacaagactgacacccatgataagcaatacactcaggcggtcacattgcagagtcacttttcgctgcctgctaataatgaacttgttaccggtgcacagtacaaacaagacagggtcagccaaaggtccggtggcatgacctcaagcaaatctctgaccggcttcattaataaggaaacacgaactcgctcctattatgagtcagagcaaagtacagtctcactattcgcacaaaatgactggcgattcgccgatcactggacatggacaatgggagttcgccaatactggctttcttcaaagttgacgcgtggtgacggagtatcatataccgcaggcattataagcgatacctctcttgccagagagtctgcgagtgatcacgaaatggtaacatctacaagcctgcgctattcaggtttcgataacttggagttacgcgctgcgttcgcgcaaggctacgtatttcccacactctcccagctttttatgcagacatctgcgggcggcagtgtcacatacggaaatcctgatcttaaggctgaacactccaataactttgaattaggtgcacgatataatggtaatcagtggctgattgacagcgcagtttactactcagaagctaaagattatattgcaagtctgatctgtgatggcagtatagtttgcaatggtaacaccaactcctcccgtagtagctactattattatgacaatattgatcgggcaaaaacatggggactggaaataagcgcggaatataatggctgggttttctcgccatatatcagtggcaatttaattcgtcggcaatatgaaacttcaacattaaaaacaactaatacaggagaaccagcgataaacggacgtatagggctgaaacatactcttgtgatgggtcaggccaacataatctctgatgtttttattcgtgctgcctctagtgcaaaagatgacagtaacggtaccgaaacaaatgttccgggctgggccactctcaactttgcagtaaatacagaattcggtaacgaggatcagtaccggattaacctagcactcaataacctgacagacaaacgctaccgtacagcacatgaaactattcctgcagcaggttttaatgcagctataggttttgtatggaatttctgatgacaaaaacaatcgttatggaattctttgtcctgatctgcccgctttgcgggcaggctaacgaacgtattgtgtttgttgaaggtttttcgacgttgttttccatctgggggtgaatatttattcttcccgccagcatgactctatagtcattgctacgacaatgactgataaagctggttactgagcctatacctttgtaattcaaaagtgatatcagttcacaacgcaatactatttttagattatttactctcacccagatactgaatcaatggataataccttttgatttatcccgactcggaagaaggtgggataaatattctccttctattgccccttactccaactatcatattttacaatatcaacgaaccgtccatgaagggctgaaattctcttcctgaaacagctctgtcagcccgctaatctgtttcagcctcagcacttcatcctggtccatgcccaactctgtgccaatacgctcatctgtccagcccagacgcgaaaggtccctgacaatgtcagacattgacgttatctggtgttttcccctggcacggttatgccgtatggttgcggcaatacgtgatgcctgtccctttctttccggattaatacaggtcactggcagccagcccttcagacgttttctcgtatccgctttcctgcccagcaactgacgatgaaaaccatccacgaccagataatgctccttctcttccgaaaccaccacaggctgcgtgaatccatcctgctccagtgaatgtttaagcagttttttttcactggaagacatgacattgggattgtaatcgttggccaccacctcatccgctttcacccacaacacacagtccacaggctcctgtgcaaaagggctgacctcatgcaacaccctgcgcagatgattaagggctcgtatggtctcttcttcagatcgttcctgactgaagtactgtcgaatcatgttgctcaatacttccacctcaggtgtcacagaatcccccattccttcctcctttctttcatacgctgcagataacgttcatagtgccggggtttgttcggactgaaggagagggtccggcaccagaaatcattctttatgagtgtcttacagatacgtcgccaagacgggatatcccggctccccaggtcattctcctgttcatccgggatgtcatccgggaagccccgcgtctgataccagcgcaggtagacagcaattttattacggtaatgttctgccgttctttccggcatcacatccagcaggaacatcgcatagctacgccaggtatgatgaggcggcttcgtgatacgcttacgcagggcaaaataggcaccgctctcattggcataaagcgccccgctggcagcacccgacacccgctcacacatcctggcccaagtttccggctccagaacatggtaaagccacagtcccttacgctgttccgggccaaaaggctcacagacccgcatgttgcgtaacggcacgccggcacggtacatcaggtcatacaggggattgtagatagctcgggttctggcgttatatatccatatatcacgggctttccagtcatacaacggatacaaggtgtaataaaacccttcaggtgacgctgtggtccagggtttatcatctgcatatctcagtttgcgctgagacaccagtcccataaagcgattgagcgattcatcagcacgaacaccagtcagtattgccactccacaccggttaccggcaaaccaggaagaaaatgccggaacaaattcttcaaacgtcatggcataccgataaaatgggaaatacgacatatctgtaatagcgtcatctggtggctgacgaacccactccacacctggttcccagcatatccattccggctgaaactgagagacaccgtttaccgtagtcagggggagtgccacccagtaaaaagtctccgtcacatcccgatacatctccctcatcttcagaatgtgtgcaattgtgcactggtactgagcttcccagtcaatgaataatacagagaaacgacgtttcttcctgcgagccacatcggccgtaagatggagcagcacagtagagtcttttcctccagaaaaagacaaacaaacagatgaaaatgtctcaaacaaccactcaatacggtgaatggccgcatgtaatacattaacatctgttcttatcttctgtatggttcccatacatatcctagtataaactatcttggcagtaatattctgaactacaaacttaaaccttctcatcaagaaaaagttctaccttaagggtatattgttactatcacgagttcatgatagttaagtttttagtaaaacacgacatatgacgatacatatattagcaaaattatgacaaatgaggctaccttaacaaaaattcattaatagcaaacacataaataaagactctcctaccaaaaaaacagactcttcactccttcttaactattttcatgagaaataataaacaaggaatttattacctttgaatacaaacttatatatacaatgaacttaaactcttgaatcattatccagagaatatcattaattggtgatgacctagctatgcatggcagcattcatgataatgagtatatactagccagaatgacacaaagagatatttaactaactaatatattgatagtcaatgatgacagatcgtagtaatatattaatacttagccctctgaaatatcaagtcatgtacgatgctcccgttattttaatttcgttctagctgtacttttgaatacaaccataactgattattgccaactgactgaatgaaaaatatcaataaatacaacaaacttactgccttttcgttttatttataagacgttccaactacaagaacaatataggcacatgattattccaacaatactggacaaaaactcccgtatctgaagatacaataggtgataattctttcaggattttgctcaactatggcctgatgggagagtcatgacggaactaaggcctttacaagccagaagattagtcttaatgcgatcacagttcaacttgctacgactgaaatccgtaatagcatataaactctgtttttttaacagaaatgaagatcttcttgttgcataaatgatgcttctctgcctctgaaaaagtaaatataaagtatacaaatgaggctaccttaacaaaaattcattaatagcaaacacataaataaagactctcctaccaaaaaaacagactcttcactccttcttaactattttcatgagaaataataaacaaggaatttattacctttgaatacaaacttatatatacaatgaacttaaactcttgaatcattatccagagaatatcattaattggtgatgacctagctatgcatggcagcattcatgataatgagtatatactagccagaatgacacaaagagatatttaactaactaatatattgatagtcaatgatgacagatcgtagtaatatattaatacttagccctctgaaatatcaagtcatgtacgatgctcccgttattttaatttcgttctagctgtacttttgaatacaaccataactgattattgccaactgactgaatgaaaaatatcaataaatacaacaaacttactgccttttcgttttatttataagacgttccaactacaagaacaatataggcacatgattattccaacaatactggacaaaaactcccgtatctgaagatacaataggtgataattctttcaggattttgctcaactatggcctgatgggagagtcatgacggaactaaggcctttacaagccagaagattagtcttaatgcgatcacagttcaacttgctacgactgaaatccgtaatagcatataaactctgtttttttaacagaaatgaagatcttcttgttgcataaatgatgcttctctgcctctgaaaaagtaaatataaagtatatttaataagattaatttttatgatagtgataatttatgatggggattcatatggcatatctaaaaggatagattacatgttgaattctacaacatcttcgggaaaaagaaccggcattttagcaattggtgcccatcctgatgatatagaattaggatgtggtgcatctctttcatattattctaatgaaaaagtatatattatatctgttgtcatgacacctggttgctgtggcgcagagtatattgatcgtcacaaggaatcacaagaagcattaaatatgttaggatgcaataaactaatccctctaaattttgaagataccagattatatttgcaaataaaagagatgatatcatctctggaatacataattgagaatgaaacgccccaggatgtggaaattactcgagtttacaccatgaataatactgacaggcatcaggatcacattgctgtttatcaggcatcaatggttgcctgtcgttatattcctcaaatactaggatacgaaacaccaagtacatgtctgtcatttttacctcaagtttttgaatctgtagatgaggtccattttaataaaaaaatattagcattacaaaagcataaaagccagatccatcgaagatacatacagccagaatacataattgctcaagccaaattccgaggacaacaggttagtcattctatgtgtgaaggttttgttgtccataagatggtgttgtaacggagtaatagaaatgaaaactttgttatttatcttcatgaccatagcaatgttgctatggtttttaagtacgctaagacgtaaaccctgtcaaaagaaaggctgtattgacgccattataccagcttataacgaaggcccgtgtctggcgcagtcactggataatctgctgcgtaacccttatttttgccgggtaatttgcgttaacgacggatccacggacaataccgaagcggtcatggcggaagtcaaacgcaaatggggcgaccgctttgttgccgtcacgcaaaaaaacaccggtaaaggtggcgcactaatgcatggactaaaatacgccacgtgtgatcaagtatttttaagtgatgcagatactttcgttccacctgataatgatggaatgggctatatgctggcagaaattgagcgcggcgctgatgccgttggcggaattccctccaccgcgttaaaaggggcaggtctgctgccacatatccgcgccaccgtaaagttgccgatgattgttatgaagcgcacgctacagcagtttctgggcggtgcaccgtttattatcagcggtgcctgcgggatgttccgtactgatgtattgcgtaagttcggtttctctgatcgtactaaagtcgaagaccttgatctcacctggacgttggtggcaaacggctaccgtattcggcaggcgaatcgctgcatcgtatacccacaggaatgtaacagtccgcgtgaggagtggcgccgctggcggcgttggattgtgggctacgcggtctgtatgcgcctgcataaaagacttttatttagccgcttcggtatcttcagtatatttcctatgctgttggttgtgctttatggcgttggtatttatctcactacctggtttaatgaattcatcaccaccgggccacatggtgtggtgttggcaatgttcccgcttatctgggtcggcgtagtttgtgttattggtgcatttagcgcctggtttcatcgttgctggttgttggtgcctttagcaccgctttccgttgtgtatgtattattagcttatgccatctggattatttatggacttattgccttttttactggacgcgaacctcagcgcgacaaacccacccgctattccgcactggtggaagcgtcaaccgcttattcccaaccttctgtcacaggaactgaaaaactatctgaagcttaatgctaaagagaaaaatgttcagattgcagaccaggtgattattgatgaaagtgccggtgaggttgttatcggcgcgaatacccgtatttgccacggtgccgttattcaggggccggtagtgattggcgcaaactgcctgataggtaattatgcgtttattcgtcctggcacaataatcagcaatggcgtaaaaattggttttgccaccgaaattaaaaatgcggttattgaagcggaagcaacgattggtccgcaatgctttattgccgactcggtagttgcaaaccaggcatatttgggcgcacaagtacgtaccagtaatcatcgtctggatgaacaacccgtgtctgttcgaactccagagggaattatcgctaccggatgcgataaattaggttgttatatcgggaagcgttcacgccttggtgtacaagttattattttgcctgggcgaattatttctccgaacacacaacttggcccgcgcgtgattgtagaacgtaatttacctagtggaacttactcactccgacaagaacttatccgtacaggagattaaaatgataaagcatacgttattagtgccgtttttttttagtgcattgcccgcttatgccgggttaacttccattaccgcgggctacgattttaccgattattctggcgaacatggcaaccgtaatttagcgtatgctgaactggtagcaaaagttgaaaacgcaacgctgctttttaatctttcccaggggcgtcgtgattatgaaactgaacatttcaatgccactcgcggccagggtgcagtctggtacaaatggaataactggctgacaacccgaacgggtattgcctttgcggataatacgccggtctttgcccgccaggattttcgacaggatattaacctagccctgttgccaaaaacgcttttcacgaccggttatcgctacactaaatattacgatgatgtcgaagtcaatgcctggcaaggcggcgtatcactctatactggcccggtgatcaccagttaccgctatacccattatgactccagcgatgcaggtagtagttatagcaatatgatttccgtgcgtctgaaggacccgcgcggtgctggttatacgcaactatggctaagccgcggaacaggtgcttacacctacgactggacgccagaaacacgctacggcagcatgaagagcatcagtttgcaacgaattcaaccgctgactgagcaacttaatctcgggttgacggcaggtaaagtgtggttcaacaccccaaccgatgattataacggtctgcaacttgcagcccacctgatctggaaattctaggcagcagtctatcagtatattttattcggtagttttcagagaaaagctataactcggtttgataataaacaatataattaatttcgggcaataacttattcgtatagagcaccagagaaaaggtgcctctatacgaataagttattgcccgaatcgtacatcagtttaatagctgagatacttttattttatcatcaccggggtgaaggtatctttatatctctctagacaggccccctgaatctccagacaaccaatatcacttaaataagtgatagtcctgatacaagtttttagagtagtcattagtgaacagataattgttaacttagaaccagtaaaatgcaaacgacgcaccacgctgggaaaatcgctgctattcagcagagttttgtaccgagaattgtggccagccacttattgctctcgcgtaagcaggtatccccatcgtttaccagtccagcacatcttgtggtcagacagaagaagagcaaactgttactggactcactgcatgcatggtggagaaaaatgccacgctatccaaaaatccagactgggtgaatggttcagctgtgtactgaatcagtggggcgcactctgttattacagtgttgacggtcaggcggaggcagacataatgccgcggaaaaagccctttgtgccatctgtctcggaaataaaaactttatgttcttcggcggcgagcgcagtgcactgttgtatgggcttatcggcacttgccttctgaacgacattgatccggaagcgtatctgcgccatatcctgagcgtactgccggaataaccttccaaccgtattgatgaactcctgccatggaacgtagttctcaccaataaataagcatcaatatgattctccattaacgcttaccttttctcaggctatttttgcttttttttgcttttccccgccactttatggtgattatcacatcaatatacatcgatagatattaacgtaactgaaatgaggtgaagcatgaaatttgaacgccatcatgaaatattgaaacgactcagtaaattcggttctgtaaaagtatccgatctgtccaatagcctcaatgtaacgaaagaaactattcgatcagatcttaatgaacttgccaggcttggctatctgactcgatgtcatggcggtgcttttatcgtcctagactcgcttgatactattgcgaaaaatgaaatcgcttatgcgcttgaaaattatgatacagcccagggaataaaaaaaggccactcaactatgaaaagtcaagtatgcgttattggttcgtttaatgttgatatcatcagttatttgccgaggcttcccactatcggagaatcgcttctggcaagtaattttatattttcaccggggggaaaaggctgtaaccaagcgctggcagcaagctttgccgatactgatgtttatttcataacaaaagtaggtacagatcactttagtgattatgcgatcaactttatgaattcgtctaagatttataaaagtataatttatcaaacgaaagaaacgcaaaccggaactgccacgatccttgttaatgaaggtactggcgataatgttattgcgatctatcccggtgccaacatgacaatgtcgtccgatgaaataactattcagaaagaagcgattattaattctgatgtcatacttctgcagctcgaaacaaattataccgctctgcaacaagcgatcacattggcgcaaaaaaacagtatcccggtcattattaacccggcaccctataatgatatcgtcaacgaacttattcaggatgttgattatatcacccccaatgaaacagaagctggtttactgtccggcatagacgtacacgatcttgaatcagctaaacgagctgcagaagctatccacaataaaggggtaaaaaacacggttatcacgctcggtagcaagggctcgctcgcatttgatggcaaaaaattcattcattcgccagcgtttccagcggtcgttaaaaatacggcaggagccggggatgcttttaacggcgctctggcatcaggacttgcgaaaggaaaatcactggaatcagcactgtgttatgccagcgcctttgcatccctagcggtggagacaagcaatgcttccgacatgcctgaacatgaatctgtgatacatcgaattcagagtatacattatcagcaaactatttttacgcattaagaagggacagagaatgaataacaccaaaaaatcactaaaagtgctctttattggggaatcctggcatattcatatgattcattcaaaaggatatgacagttttacctcaagtaaatatgaagaaggtgcgacctggttactccaatgtctgaaaaatagtcaggtagatgtcacctatatgccagcacatacggtacaaattgccttccctgaagatgtggcacagttagaacaatatgatgccatcgttattagtgatattggtagtaatactttcctgctacaaaatgatactttttatcaacttcgcataaaaccaaacgctctcgaactgattaaagaatatgtgaataacggtggtgggttattgatgattggcggctatctctcattcatgggaattgaagcaaaagccaattataaaaatacagttctggctgatgtgctcccggttacgatgttagatggtgacgatcgtgtcgaaaaaccagagggtgttattgcacagccatcacaacctgaacatccagttattaaagggttctctgaatatccttttttcctaggttataaccgggcgatcgctaaagaaaatgctgaggtggtattaacaataaacaacgatccattactggtctttggtaactatcacaacgggaaaatagcctgctttatgagtgactgttcaccgcactggggtacacagcagtttatgtcctggccgttctataccgcgttgtgggtaaatatactgactcatattgcaagataataataatggggtaactccagttaccccatttactataatagaaggattgatgtatgaaaaagaataagtactcaactcccttatggatgcttgccacgattcttgcgggtatgctctcccctatgcaatcagcggtgaatggtcaattaggtcactggttacaggatggtaatgcatgcgcagttatctcctttgccagtggtttagtcgtgatgttttttattattatggcgcgaaaagaaacccggcaacaatttgcggcaattccttctctgattaaaaaccgaaaagttcctctctggaactggtttgccggtctctgtggagcgatggtggtattttctgaaggcgcatcagccagcgcactcggggtcgcaacgtttcaaaccgcactgatctccgcgctattgctgtctggtttactttgcgatcgctttggtatcggtgtcgacgagaaaaaatactttaccccttatcgcatcatcggtgcattatttgcggttattgctacgatttttgttgtgtcaccgcagtggcattctacctctttcatcttacttgccattcttccgttcttagctggtttgcttgcaggatggcagcccgctggaaatgcaaaagtagctgaagctacgggatccatgctggtttcaatcacctggaatttcatcgttggattttgtgttttaggcacagcgctagctattcgtgtcgcattagggcacgtcactgttcaattaccagatgtctggtggatgtatcttggcggcccgcttggactaatgtctatcggtttaatggccattttggtcagaggtctggggttactgatgctgggggttgcttcaacggcgggccagttactgggatcagtattgattgacgtattaattccatcgctgggcaataccgtttatctggtcacgatcatcggaacactgtttgcactggtcggtgcaattgttaccactattccggaatacagaacctcgaaaacaatgaagaaaatggaggtataatcatgaaagattatctacaaactgtgacgggccccgtcgcccgtgaagatatggggctaacacttcctcatgaacatctgttcaacgatctttcctctgttgtggatgctccttgctatcctttttcacaacggcttgttgataaaaaagtcacggcagaaatccagtgggcattaaaacacgatccttattgctgcgctgataatatggaccgcaaacctattgaagatgtgatcttcgaaattaataactttatctcgctcggtggtcgcaccattgttgatgccacagggtctgagtctatcggacgagatgcgcaggcattacgagaagtcgcattaaaaacaggtctgaatattgttgcttcctccggtccctacctggaaaaatttgaaagccagagaattcataaaacggttgatgaactggcggcaacgatcgataaagaattgaatcaagggattggcgatacggatattcgtgccggaatgatcggtgaaataggtgtctcaccgacatttaccgaagccgagcataacagcttgcgggctgcctcgctggcacagattaacaatcctcatgtggcgatgaatattcacatgccgggctggcttcgtcgcggtgatgaagtactcgacattgtgttaggtgaaatgggcgtctcgccaaataaagtctctctcgcacactcggatccgtcaggaaaagacgtggcgtatcagcggaaaatgcttgataagggtgtctggctggaattcgacatgattggcctagacattaccttcccgaaagagggaatagcgccaggggtgcaggagactgccgatgccgtcgctcatctcattgagttgggatacgccgatcagcttgttctcagccacgatgtcttccttaaacaaatgtgggctaaaaatggcggtaatggctggggatttgttccagatgtttttctggcctatctggcggagcgcggcgtcgataaaacgatcctcaaaaaactctgtatcgataatcccggacgattattgaccgcataaaaccattatcccccggcacactgcgccgggggatgtcaattaataccccgccgttaaatcatccaccaagcgcgagtcggatgcgccgtacaactcaccatccgacccaaccataatgctttgcgtgctgcccatcgcctcattcagcgccactttctgaccttttgcttccagcagcttgagcgtatccggactaaacccttttcaacacgcagctagtccggcaaccactgatggtggaaacgaggcgcattggtcgcttcggcaacattcattccacaattgatgctgttcaccaccatttgcagcacggtagtgatgattcagctaccggtaacaaagtgagtacataaaggccatactgtcacgaacagtgcaaaagtggctcttccgcaacctaggtgaagattttcatgccagtggactcattaccctccgcctaagtagttcaaatccggctcgaccatacatctggcgtatcagcaccttcaggcgatttacatgaccttcgacaacaccattactccagcgactgctgattgcctcacatatagccgcagcatcagcttccatccccgcagctacgcaccgaagttctgctgagccgctttcgtgaactcgagtgaaccagctgcttagctgtgatttattttaggttttcagaatacggtagaactcgagtaccagttgctgtgctattttcaactccggttctttttcacacatcagactaataaatcgggatgcataattttcttcgcccctgattattctccagggcatcaaccagcggcttacccgggacactgaaggaagtcttgcggcagtagtaaccggtgggttccagcctttacgccatttggcaacagtatccctgacgatggtttcactgcctgtccccccctgggccaccatttcccgccatatccggctggcattataattaccactttctcgttgctcttttaaccactccctccatgggtccagaagccctcgctttggaggccgggttgacatttcagggaatgttcctgaacgcacccagcgactgactgtcactcgcgacaggcctgtaatacgggatatttccctgaaactacatcccttgttatgcagggccataacctctgtccaatgctgatgccgttttttgcgggtttgctgtttaaggcgttccggacgacggagcgatgctacaggcacagatatttctggctcaggtgatttattcagtgataactctctgacaacaagacgtatcagaggcatatgtctgtacatcattcgttcaggctcatcaccaatactttttagcaggtgccatcgatcggccacctgtctggcctgaggtgcaccttcacgtgctgctgtcgcatagactccactgcgatcacgcgagacaacctgtatttccggatattttctgaaccaggtcgccagcgtacgctgatcacggccgggaagcaggacgaggggacggtgagtatcaagattgactattaacataccgcagcagtggccccgatgccacgcccactcatcaataccgacatgaggcgcgcctgactgtttcgtctccggggtattgataaccctgcgaagaagagtatcagcactgcaacggagacccgctgccgttgcagcccgttttccagcctcacctccagctattaatcccagttgacgttgtaaattttgtaacgcctgtgaagactgctggtgtgaaccggcgaagggagcaagcgactcggcaaaaattttacgttaacaagccgggttacggcagtaccagtggcggacggaaaatacaagccatagcgtctgccctgagcagggtagatgctgtatccggcgccgacgacaactatgaacagagtcgctacgcttaaagcattcaggacattgtgctgttttgcgttttccgtggagatggagggttataccgtcagagctaataatttgtcgactgcatcgccatccgcaaggtaactgtagaagtgtcttaagagagtgcattgcgttgcccataacttaaaacagcttagatccttgttcgccagaaagtttcatccattttcttccacccaggttgcggaagaaccacttttcatccgtcgttgacagatgtgaagtatgcgggagaaaaagtgaatatctaactgtaataactcagaccggtacgagtacccgggacgtctacaatcattcagggcaaagtgctaaaatttctctatcccgggatgcccctaccaacgcagcactcccggagatatcattacagctctacaactgatttccgcgactgaaccgctcagttcctatccttccagttgccttcctgcagccccccctccctgctgtataccccggtaccacaacgcgggcagcacttttctccttcataatcttcgtcacacatcacacaaaaccactttctcaccttcaccgtataatccggaaccgtcataccctgcagatgcaaacgacgggcctctttctctgccgggtcaagccaggtcccctgcagatgcaaacgacgggcctctttctctgccgggtcaagccaggtgcatcgcagcaggattttctcagcgacagtcatctggtcatgttcaaaccacggtggttgtccgtcattgccccgctgaagtgttaacgggcatccacaggacacacagcacaaaacgtcctggcggttgtgcttcgctgcttctttcgccgtaacaaaatggcctttgctgtcattcgccatataacagttcagaattcgcatatttcctcctgagttgtccggggaatactgaatcctccggtctggcagtgtgtgcagtaccgctccccataataatcgtggtgacattgtctgcagtgccagctggctttacgcaccacgggtaaggcatccggtacgaattgctgcagacgtttaatcaactgtatttctctgcgctccggcctgacataagggcactgttgaccgtgctctgtcagcctgtcgtcagtgtgttcaaaccagggaagttcagtgtcgtattgcggatggtatctgagtgcactgccacacaagtggcaggtgtagtgagcataaggtgcggcctgtacagtacgggcgcccgtcagacgtccgttgctatcaagagcgagaaaggattttgcgtacatagtatatgttccttaccgtcagacgacacgcaggcaacagccgtcccggtacgggcagcgtggtcaggtgtgaatggcggtttcagttcagtctcataagggaaaatcagtgtggtggccatgaacacgtcatcacactgaagtcagataactcgtctgtctggctcagccacgactgcagccaaagttgcgctcaccggtgcagtgagctttggtatgctccttcgccagatagtcagcacgttccagcacttgctgaaagccggtgtcatcattacgcgccagccacaccgccggccaggccggaaaatgcaccagcgtggcatggcatccggcatccacccccagggcactgcaccaggcctgttcaatcattccggccagtgatcccggagcgcggtaatcaccggcacgacaccaggtatcccggttgaccagcagcatcagatgatagtgttttttacctttgcactccccaaactcccgggcccagacgtaatgcagagtggtgggatgcacgcgtttaccttcccgatgcttacgtttctggtaagcgtcgattcgggctttcagggcattgatgaagcgggatatcacagctgcgtccgttgctgccggtacatccgggaaacgcaggtcaacccgcaatgccgtcaggcggggatgaacattcagtgcgtgccgcactgtctcacgaatacgttgctgccagaaggggttgtatttgtaggtcatggttaaatctccgtatggttcatacggaatagccacgtcgtaaaaaatgcgcagagtccctgaagtgacctccggcagggcactgtctcaggcactctgtgataacccgaacggtcgtctccggactgacggttgaattttcagcgttgtttttttaatgtaaaaaaccggttacgggtaaggctgtgaggagggagtgatggtgatacgcaaaaagaagtgcagggactgtggaaaccgcgattactcataatacagtgtgttgcccgtattgtggttctgtcgaccccttcggctattaccggaatacagaccgtatcgttaccatactgctggcactgattattgtggtcctgctgactactgtcagcgtcagtgtgtatatactgtgtagctggtgagataacggttcatgtatcccctgagctgacagtgtaccgggtatattaagcgtaaccgacaggttctccttcataccatattaaatttttccaggtattgccgctgccttatttcgtcccatacaggaaaactcgtctgggtttctgacaaatacgcgaaactcacagcccctcaatatcaaccacacgccgtaagccggtaatacctgaaaatcagtctattaccgcccgcgcctccgttaccgaacgctcaggtgacaagactgaagccagcacgcactcgtaaaatttgcggtcagttctgccagccggttgtcaacggcagagttaaaggcttccagctccgcaagggtaagtttataacgcgtgtgggaattcacttttcccgcgtctcctgacgtattacgggctgccacttacctggtgtcccgcaatacagccttagtgttccgttatcggggatccggacgcaccgcaacaaccggggaagtatttctggttagagcagtgtcaagagggatttctcagcccctcactcaccggctcagtctcagggcaggagcattaatacgctcagttcatgtcttatacaggaatgggcatagggggagctggcgtgtcactgctgattttacgcatcagcgttcatgtatttgcactctgatacagaatgcttcacagcgctctgttaccggagagatttactctcttaggttattctggcaaatcctttacgttactctctgatgacttcttatatttataataccaatcagacaaccttatcccatcggtgatatcagtctcctgctcgccaggaacgggctgactcactgtaaccacctccgaaaacaactctgcaattatcagaacgcctgcttctctccctgtcctcacgaaaactatcccctctttatcgcgcgtgcgtgcggaagcatcttttcgcacccccgttactttattcgtaccccttataatggggtgttagccagccagacccggcatgattactgcccccagtcgtccatgatccggggggtgatgtcaccgggtctggtggggcgctggtaaccgctaataggggtcaggtcaggcacttttgccgggaccgtctgtaacgtggatgccggtacctgctccccgtggttatctggttaacccatatacaagggagacagaatgaccgaatccagcgattacgaatccgtccaggtctttatcggcgttgatgtcggtaaagatacgcatcacgctgtagccattaatcgttcaggtaaacgcctgttcgataaagcattacccaacgacgaaaacaaactcaggtcgctaatatctgacctgaaacaacatggtcagatactgctggttgttgatcagccagctaccatcggtgcgttacctgtcgccgttgcccgctcagaaggagtccttgtcggatacctccctggactggccatgcgccgcatagccgacttacacgccggtgaagctaaaactgatgctcgtgacgctgccatcattgccgaagctgcccgtaccctgcctcacgcgctacgcacgctgaaactggctgacgagcaaatcgccgaactctccatgctctgcggcttcgatgatgatcttgccgcacagacaacgcaggccagcaaccgtatccgcggccttctgacccagatacatccggcactggagcgcgttctcggtccgagacttgatcacccggcggtactcgatcttctccagcgatatccctcaccagaaaaactcgcttcgctgggtgagaagaagctggcagcccagctctgcaaacttgcgcctcgtctgggtaaacgccttgcagcagacatagctcaggcactggccgaacaaaccgtcgtcgttcccggcacgaatgccgctgccgtagtactgccacgtctggcactccagctcatcacgctgcgtaagcaaagagacgaggtggcgcttgcggtagaacagcgagttcttgctcaccctctttacccggtcctgaccagtatgcccggagtcggtgtcaggaccgcagccagactcctcaccgaggtcgcctgccgcgccttcgcctctgtcgcacatctcgctgcttatgctggccttgcgccggtaactcggcgatccggctcgtcaatacgcggtgagcatccctcgcgacggggtaataaagctctcaaacgggcgttgttcctgtcggccttcgccgcgctcagggatccgctctccagggcttactacacccgcaaaatgagtcagggaaaacgacacaatcaggcgcttatcgccctggcgagacgacgctgcgacgttctgttcgccatgatgcgcgacgggactttttataccccgcaggcgtcataacatgcttgacaacttaataggggcaccccccgggattccgctacggctctgccatcgcaatccccccgtttatctccggacagccagattcccgattattttttacgtttctccccggttgttatgccggtgaaggtggcgcgctgttttcatgaccacaccggctggtttaacaacatccggaggaacattctcatggctaccccagtttcgctgatggatgaccagatggtcgacatggcgtttatcactcaactgaccggcttaaccgataagtggttttacaaactcatcaaagttgggggctttcctgcccccatcaaaatggggcgcagctcccgctggctgaaaagtgaagtggaagcctggctgcaggcgcgtattgcacagtcccgtccgtaatttttaaccactaacccttcgcccaaagcagacgcaatctccggcctgccggcggcgctctgctgcctgttatcccccgtgaggaatatgaaaatgaaacaacagtatcagacccgttacgagctgctccatgaaaactaccagaaatggctgaccggcttcacccggcacgccgtatcatggggcgtgtgtcatccgaatatctactatttccataatctgacgcccgggtgggtgtcattcaatggcgaaaaaccggagattgccatcgttccccagagtctgcaccggctgatttatggtccggacaaactacaaacggagctccccgtccctggatgatgatctggtggtgaatttatgcaccagcgaacacctgctgattcatcatccgatgctggaagggatcctgctgtctgaatgtgagcgcctgaagcaacattctctggcaaacaaactgatcagcctcttccgtcagtttggcggcacggagttacgtctcaaactggtctggctctgctggcttgacttaatgaccggaaacagccttgacgactggacgaaaaacctgaaacacaaatcagaaaaagatctggagcaatggatcattgcacgtcagggtcagagtgaaccactgacaaatctgatggatcagtacgtgcttatggcataccgtacatcggttgatgccgctcacagttgatgtctgataaccacagggctggcagcagaaaaccagccctgtggtaaaatacagtaatagcggcgtacatcaggcacgccgctcactcgtccacagatcatatacgtcattatactgcgcgataacggagggcttcagcacccggtcatttctgagcgggtatgaataccattgatgatgcgaagcagccacgggcagaaacgttcttcacaaccaggtgcctccatcttcactgcaggctgaatgtgccggcttgttatccaccagaaatggtatgctccggtacatgcataccccggagactataaacgcactgaatcatagcctcccacctcagcaggaggcagtcagctttcaggcggaaaaacgttgcagttaaagatcgtgagaatcgctgtttcgttgcatagcaacccgaacagttgtagttgaaacattttacctgcatcagcacatggtcaggcgccgtctgtatggcgtggaatactgatgtttcggctgatggcaagcctcattctctgtggaaacaggggcgcgcattagcttctcaaccagagagtgtcacaaagacaaatattgctgaaaatcgcattcatcgttcaggcgtgaatgcccggagacaaaagccgctgtccgcacagcccccctctgatctgaacaaaaagcatacacacaacaggctcacctgaccccgaaaaaccataacttcagcaataccagtgacaccagcacgttacctcagtgccacatcttcagaccgcgatcaatctgaaatgtgactatcggggcaatatcccagttttgtggtacacgataaccagaaaacatcccctgaaccgccagccagaaagaccggccacaaaagggttaagctgaaatcgtttatggattacatcgacatatgcctggcagagaatgtccggaatgacgaggttatctttgcggagattaaggcaatgtgtcaacgacggatgaaaagtgatccacttatatctccaccaacggcccaatattgatccaccgttttactcaggattagcttctgctataaccccggcttttcgtttctgtctgagtcgatagctttctcctttgatttgaacgacatgtgagtggtgtaagatacggtccagcatcgctgaggtcagtgctgcatcaccggcgaacgtttgatcccactgcccgaacggcagattggatgtcaggatcattgcgctcttttcgtaacgtttagcaatgacctggaagaacagttttgcttcttcctgactgaacggcagatagcctatttcatcaatgatgagcaggcggggggccattactccacgctgaagcgtcgttttataacggccctgacgttgttccgtagataactgaagtaacagatctgctgctgttgtgaagcgaactttgatacctgcacggacggcttcatagcccatcgctattgccagatgggttttccccacacctgatggccccagtaatacgatattttcattacgttctatgaagctgagtgagcgtaacgactggagttgcttctgcggtgctccggtggcgaatgtgaagtcatactcttcgaacgttttcaccgccgggaaggctgccattcgggtatacatcgcctgtttacgttgatgacgtgccagtttttcttcatgaagcagatgctccaggaagtccatataactccattcctggtctactgcctgttgtgacagcgcaggcgctgcgcttataaggctttccagttgcaactgcccggcgagcgccatcagtcgttgatgttgcagttccatcatcacgccactcctctgcagaatgagtcgtagatggagagtggatgatgcagggggtgtttgtcgaagttcaccagattttcactaggatgcacgtcatactcttttttctccggaggcagtgccagcatggactgctgctcttcgagccagcgatcgcagggacgggcctggattgtttcatgctttcgttggttagcgacatcgtgcagccagcgcagaccgtggcggttggctgtttcaacatcgacagtgatccccatcgggcgcaggcgagtcattagtgggatgtaaaaactgttacgggtgtactgcaccatccgttccaccttacctttagtctgtgccctgaaggggcgacacagtcggggagagaagcccatctccttgccgaactgccacagcgaaggatggaaccggtgctgaccggtctgatatgcgtcacgttgcagaaccacagttttcatattgtcatacaacacttcgcgcggcacaccaccaaagaagcggaacgcattacgatggcaggtttccagcgtgtcataacgcatattgtcagtgaattcgatgtacaacattcggctgtatccgagaacagcaacgaacacgtgaagcggtgagcggccattacgcatagtgccccagtcaacctgcatctgtcgtccgggttcagtttcgaaccgaacggcaggctcctgctcctgaggaaccgagagagaacgaatgaatcccctgagaatggtcattccgccacgatatccctggtctctgatctcgcgagcgattaccgttgccgggattttgtaaggatgagcatcggcgatgcgttgacgaatataatcccggtattcatccaggagtgaagcaacagcaggtcgcggcgtatattttggcggctcagattttgcctgcaaataacgtttaaccgtattgcgggagatccccagttctctggcaatcgcccggctactcattccctgcttgtgcaggattttaatttccataactgtctcaaaagtgaccataagctctcctgaatcaggagagcagattaccccctggatctgatttcaggcgttgggtgtggatcactattgcaccgttcgtgacacaatgggccatacgggccgacgttccatgccgcgttactacattcagcccggacgtaaaatgcgcccgtcaaaaagaacggttcgcttcgaaactcagccaggataccacctctccgccacacccgggaagaagttgatatggtggttgccggacaacagagctcctggattgactgctgcatcactcaaccacgctgaatatcaaaggagagcgttaccggttaaaagagaaacgtaaagctgtggtgatgacccaaaacgcaacgcctgtcagtgaggatgaaatggtgaaaagcggacagcaccagtaacggaagtatcttagcgggtacgaaaatggcaggatcgtgacattgacagaatatctcctgatcatcctgaatgactgcagttgctgtggaaaagtaagctgtctccacccacggcacgacttaacaggcattccgtaactcccccagacttactatgacgcattatcggtgcacttaaaaccgcagaccgcattgcgggtgttactgcatgacagtctgaccgtattgtgagatgtcggcaggaaccgatgtccgcgcaggggggaacttcctgcagtacctgacgcttcaaatagtattaaccgtagggcgttgttggttccggatcgcggaaatgggagcacaggtctgctacggggtgtacctctgacagtaaatccggctcgctcatctgacagcctctctcccggaaaagaccaaaaatgagatcgtctcctcaacagcagagaagaggtcttgacagacaggctacattgcatacgatttatgaagaaaaagacagcaaatatggaggttatagcggagaacaccctacgaaattcctatgaaaaacgattgaaaaaaatatcaaattcgattcgtttttatatgctttttgggaacgtggcgatgacgaactgttgcatgtgcagaggagaatgcacccggaagcaccagaatcatccagaaaggcagaacgattacgcatcaaaccaggagacagcaatatcaaggtaatacactgatttaaaatgaatttacagcaatacgtgaaaacattttttacttaaaggagacagatgcgctgaagagagtgcaggtatttttatataaaaatgagaagattacgggatatatatccggcacactatgaccggagaataccagtcaggcttaaaaagacaataaatacagtgagttaaatacacagagaaaacgaaaacgtagtatcagagggtacatcttacaacagagactgaatttccggtttttcataaccggccattccggaaagtgcaggcggcccggagctcttctgacgccagtacctgccagattgttctgtacattctgtacatcatgtacggaggtttttgtttgctttcttaaaatctgcaaatgtgggaagagcaggtgaggtgtattgtgggaaaggaactggatgatatctgcaccagctgtccgtatatcgatgctataaaacggcacaaacaacagctcggtgccatagaggaatatacacagtggttaaaaaaagaaccacgggcatcttatttttttctgttccggctgtatacccgcattcacaatacatttttccccaaaaagcaacaactcccgttcactcccggtggcactcactgcccggaacctgatgtcacccttcgggacttaacgctttccccgggctaccacagtgattatgcccctcaacccattccggagatggacagttctgctgttgttcccccaactaatgaaaacacctcgcctccggaagatactcccgacaacactccggccggaggcaataccggacaagcggaaaagaccagaaactcaggactcacacccattcctgaaaaacgttcaggaatgcccccggaacatctgcggtttgccacagggtttccaccgcaaccgaagattgccggtcccaaaggaaagccgatgcgcaccgtgcatccggataaaatctaccgtgaaattatatggttctgctccggttacctgcggaaatccggaccagaggctacgaggacgatcatcaactcaatattctgtgaatgggccagcatcttcaatgattactcctcccccttttcgtgggtggacagcagggacagtgaacagtgtgactggttatggaacgccatgcaggtccggtgtgtgggaaccccgctgaatccccttaccccggagcagaaatactggttcgcctgcgccacgtttgataactgggaaggctggaatgagcaacaggtacagtttttactggaaagtaatcccagacggaacagagcgaagtttacgcaggcctccttccaggcccccaggattcagcataaagcgattcttcttgatgagctgaaaagtgcccgggagcaacaaaaaaggcgtgatgaacgtgctgatggttccgtcccgctgaaactgtccggaaaaatccacaaacagcttgaaagtattgcccgaagtcgtggtgtcctcccaaaaaaactgctgaatgaaatgattgagcaggcgtaccaggactttgtggcaaatgagcaacacaagacactgagttaaggaccgcagggcctccggttaccgattctgcagcatacacaacgaatgtgtccggctcttacctgtgggggccgcactaaagttacgcattgagtatgagtgggtaatcccggatgagaatatcccggtttttacactattcactgaaggtgcgacatatcattcagtctctctgaattcttcatttcagtaacttcagctaccttcgtttcatctcccccacgaaccggggccgcaacttgttgtgtcaataccaaattgttggtcattactgtcttgtgtcactggcgctgacaagtgaactgaaatccgcaccttaatattctgactggctgcgtacattcatggcatgaagcggccggagcggctgaactgaaggtccgttgtgagcgaacagcggacattcactacacatggttcaaacatgaaccggagctttattgtctagctgtcagtgtactgcgatttacccgctcggctgtccagaaaatcggtctgaaatccagtcattaaagggccttagcctgacattaagcaacttggtaggcggatagataatagaaataggaatgcgcaggtctgtcatgttgcctagaacggtgacaagctgtccggtgcgaaatcattccggcagcgacaggctcatgtgtcagcccgacgcccagaccgtcaacgagcatgtggatctgcgaggcgttatcgttcgcagcgatgttaaaacgaacaatctgctcatcttctagaagcacaagtgctttaatgacattaaggcggtctatatgttgcattacagacttcctattgatctttacctgaggctgaagcaaccacgttaatccgactatttttcgattgcaccatccactatcaccatcgatcttccctgagcacaacgttcaactctcccgcgtacgccgtatacctgcgcaaggctctctgcatggatcaccgtttgcgggtcgccgctgtcgataagtttcccctctttcagcatgatgacctgggcggcatgccgcagtgcgatattgatatcgtgtaagacgaccagcgtaaccatattgcgtcttcgcgtttcgcgcgatacaacatccatcacatggaactgataattgagatccagcgcgctcagtggttcatccagcaataataatgcggggcggcgaataagcgactgtgcaagccccaccagctgcttctgaccgccggacaggctatcgaggtagttcattgccagatgtgcgatgcctagctcttcgagcagcgctatagcctgcgcctgattttgcccggcgccggaggcgcgctgggcgacaaccaccgactccagcacctgtaaatgcacgccctgcggcagggactgcggcaggaacacaactttttcagcccgacgagcaaacggcagcgataagagattctcttcattcagccaggcttcgccactggcgcgatttagcccggccagggcgcgcagtagcgttgatttaccgcagccattaggccccagcagtacagtgacttcgccgcgcggcagcgtagaaatcgacagatgctcaataatccgccgtttgccgtaaccggcgcacagcgcattaatcgtaagcccgctcatgacatactccctcgatgacgcattacaatgctcagaaagaacggaacgcctaccagcgaggtaacaattcctaccggtaaaatgacaccgggaatgatgttcttcgacgctaccgaggccagcgatagcaccagcccaccgataaggatgcttccgggcaaataaaagcgatgatcttctcccagcaacaggcgggaaatatgcggtgcaaccaggccaataaagccaattggccccacaaacgcaaccgaaagggccgccagcaggctgatgcgcagcagggaacccaggcgcaaacggcgaacatcaatgccaaaactcatcgcccgctcttcgccgaggcgtagctcggtaagctgccaggcacgacgcagcgaccagggtaaaacaatcgccatcgccgccgccagcaccgccagtttctcccatgatgcgcgagccaggctgcccatcgtccagaacaccagacaaactgcataatggacaccagcgcattgaaggtaaacaccagcgcaatcccaaacagcacaacgcccgacgtcgcgggtcagactatcgagcagcagggcggacaggagcgcaaaaagaaaagcgtttgccggtataaacccgctttcgggaacgccgggaataccgatgcccagaacaatcgccagcgctgcgccaaaggccgccgccgacgaaacgccaagcgtaaacgggctggcgagggagttattcagaatagtttgcatctctgccccggccaaacccagcgccattcctaccaggagcgccatcagcgcatagggcaaacggatgtcccaaacgataacccgcatgccgttagtcgccccggacggatgcatcaaagtctttatcagcgaatgtaaagggagccctgaggggccgagggtgaaatcgagcagcagcgaagcaatgatagcgataaaaataaccgccagtattaccagacgctggcgaaaaagctggcgatagcggttctcgaccgacagcgtactttccaatacagtcatggtcagcgcgataatctgttcgggattgatttcatgcccgctgtttacgctaactgctgcgactttctctatgcgcggcaggctctggcgaaacagggggatcctttttgcaatcatcgaggttccgacaatgttatcgccgtaccccagcatggcaataatggtattttgcgccggccacggtgacgcgatacgcacctccttgtgcgtattttctgcgtgcaggctggccgccagcagcagcgccagcagcggaaataaacgggagagtttcatcatttatccatcagaaatcgaaggtgacggatgcacgcacttcgcggccgccgccgataaacgcacttggggaaccgttatcgccatcggtacccgatgggaagatagaagcccagtaatgtttatcaaacacgttgtttaccaccacgcggaaagtggttgggacgttgctcactttcgtggtgtaacgcgttcccaaatcccatgtggtatagctgctggcgtaagaggtgttggtatcgttcgccgcgcgtttgcccgtataatggacgttagcgctgtaaacccattccggtatggacggcaaactgtattccgccaacagattggcctgcactttcggcacgccgacaacctgtttattgctggttgaggcattcgccgtatctttcagtttcgggtcgaggaaggtcacgccgctgtaaatattcagcccctgccacacattcccggcagcggttaactcaaggccgttgttaacctggttaccctgctctttatacacgttatccgtatcaagataggcaaacggacgttccagtcggaacagcgcggcgcctagattcatctcgccgatgtccgattttagccccacttcatactgcttgctgcgatacgggtttagcgtttgaccggcattttttacgctctcatccgtcggtgcggtaccgccctgctccagcgaatcggcatagctaacgtaggccattgtgttaggggtaattttatacatcagcgcggcgttcggacttaaaccattttcatcaacctggttcgtttgattaccgtgcttatcgtagtttttagtctgcagccagctctggctgagatagaacattgccgaccactgcggcgtaaatgtcaccgtatcgccgagcgtaacgctctgctgagtatttacgctggagcggtatcgcggcccgccggtgcggattttgccatcgccctgctcatctatcgcatccgggtgatacatatttgttgtaccccagctatagctggaacctgttcctttggcactataaagcgaccagacatatcccgtggtagaaagtgacagatcgtggccgatagagccggtatcaatatgaccattcagcccggcggtgttgctcaggacgcgaaaacgtccggcagcggtggaatccttcatcgaacgagagatatcgccctgattgttgagtattttactggaaacactacgcatcgcgcggtcagcctgctgccagcccacgccagcgttcatggaccagtcgtcgttaaagtagtggatcaggcgagtgctgatggtatcggtagtgaggtcgttgcccgcagtgctgagcgccagatttttgtccttcggattcggcgcagacggcagtttgacgttcggcccataacggcagtttgacgttcggcccatagttaaagctaccgacatagcctttctggataaattcgtaatggctggcgtcgagctgtagctgagtgcccggctgaatattccagtcgagcgcaacggaaacgagtttgcgacgcagcgtgctgtcatccacattgccttccccttcctgatcaagcaggttcacgcgatagccaaaccgtttgttttcatcaaaatggccacccagatcggcatggccggtaaacgcactgcggctttgatagcccagcgtcactttacgcagcgtctcttcggttgggcgcttcgccacgaaattaaactgccctgctgggctcgccgggccgtacagcgcgccggtcaaactgttaagcacatccatgcgctcaagcatttccaccggaaacgcggttgttgaaacgatattcagcccgtccagacggctgttggccaccacgctgccctgcatcccccgactttgcggacgcccgacatccattccaccgcgcgcctgcatttgcgtactgggagagtatttcagcatctcgctgacgctttgcgcctgctgattttcaatcatctctttagtaacagtggtgctggaatatggtgtttcgatccaggatttcgttcccagcgggccgacatctatatcgttcgttttgaaaccggcaccggcggcagaatcggtggtgtcggcggcggtgttgcccgtgacaatcatttcatcttcagaagtagacgaggcatgagcatgaagcggtatgaaagacgctaatgctggcaaaagcgcagcgaaagttatttgagttttcatgaatcactgatcgttatgtaaatatttatattacgatcggtgcataggcaaaattatgatccagatcacacgtgaatgtaagttatttacaaattacgctaaccttctgtctccgctctttgcagcataaaagtatggcggcgcgttgttgaaagcaggagcggccgagttgtcagaaagctggtttggacgcaagtaatatataacaactctgattaccgcatactgtcaggacagtatctacttgagcgtccgcctttggcacaaagcggactgtcagattagattcagacctgtactcattagctgatacaaatcagccacatatacctgcattcaaaataatttcagaaagatattatctccgtgaatcccccgccacctttccggtgcacggggttttgtcttttttcactgggaatacatgtatgaatccgtctgatgccattgaggcaattgaaaaaccgctctcctccctgccttacccgatttcccgtcacatcctggaacatctgcgcaaactcacccgtcacgaacccgtgcctggcattatgggtaaaagcggggccggtaaatcctcactctgtaatgcactgtttcagggggaggtcaccccggtcagtgcactcatgacagtgcttcccggacatgccgccatccatctgatgacacgcctgcaggacgaactgcgcacggagtctgtccgcactcagacccgtgaacagtttaccggtgcggtggaccggatatttgacacggcggagagtgtctgcattgcctctgttgcacgcacggttctgcgcgccgtccgtgactcggtggtctctgttgcccgcgcggtatggaactggattttcttctgaacccggtggtgatgtaccaggctgttgttacagatttttaactccatgaaaacactatgcaaacgcagccatacccggggtgtccccttgcgttgtgttcctcaagttaatagaatacatcgatcgttactattatattgatcgttataaacgatcgtttgtagtaaatgacctcctccgtggttgtcatgaaaatgcgtctcaggaaggttaaataatgcacgaaaagaacatcgccctgctttgtgatgaagccgaccgacttttgcaactgaacattaatctgctccggcaaatggttgaggagccagatgtgttatctgacagtaagaacgaaaacagactgctttttgataaacagaaagcactgaaaagaattgaggagctggagggcgaacaaatcaaaaccgcccgcagggagatggtgctggctgttgtcggcacgatgaaagcaggcaaatcaaccaccatcaacgccattgtggggcaggaaattctgcctaaccgtaaccgccccatgacctctgtaccgacgctcatccgccacgttcccggaaaaactgagccggttctccatctggaacatattcagcctgtccgcaatttattaatcacactgcaggaaaaactcgccaccccggcaggacagcaggtcgcacagaccctgcagcaaaccggggatacccgcgaactgctggatattctgacggatgatggctggctcaaaaatgaataccacggggaggaggaaatctttaccggactggcatcgttaaacgatctggttcgtcttgctgcggcaatggagactgaatttccttttgatgaatacgcagaagtgcagaaactgccggtgatcgacgtggaattcagccatctggtggggatggatgcatgccagggaacactcacactgctggatacccccggccctaatgaggccggacaaccgcagatggaagtgatgatgcgggatcaactgcagaaagcctctgcggttctggctgtgatggattacacccagatgaactcaaaagcggatgaagacgtccgtaaagagcttaatgccattgctgacgtatcagccggccgcctgtttgtactggtcaataaatttgatgagaaagaccgcaatggcgatggggcagatgccgtacgccagaaagttccggcaatgctgaacagcgatgtgctgcccgcctcccgcgtttatcccggatcctcacgccaggcatacctggctaaccgtgcgcttcatgagttacggaaaaacggaacccttcctgttgatgaagcctgggtcgatgattttgtcagggaagccttcggtcgcatgaaaaaagattacgtctgtaaagacagcgaactggcaactgaaggggcgacagacctgtgggaatgctcacttatcgatcaactgataacggaagtcatactgagttcacactccagagctgcggcactggcggttgattctgccgccgcaaaactgatgcagaatgcagaaaatatcagtgaatacctgtcgttacgccatcaggggctgatgcaaagtattcagtcactgcaggcgcatatcaccagcctgcttgaggatatccgggaaatagcagactgtcaggagcaggtgaccgctgatgtcagaatggccatggaggagatcgatgccagaacccgggaattactgacgggggtctgcacctcactggaagaggagctgaatgactatttcagaagcggtaaacgcaaagaacagcaaatgctggaggaagaaaattcagcgcagccccgggagagaaacgcattcgctttctttcacgatattttcggaaccggaaatcagcatgacaggatgcgggactttgatcccgacagccccgaaataaaattcagtgatcgcagggaagcccttgaactgatgacgcaaatcgaatcgaccgtgaccagcctgcaccgtgaggctgaagcacagttccggcctgagctggagaaaatcgtcagcgggattgaaacaggttttcgtggcacggccctgtacgccacagaaaacattgccggtcgcatcaatacccgcctggaggatgagggctttaccgtaaaaatcagttttccggcagtcagtcagttacaaacccggctcgcggtaaaaacaaatctgagtgcgcttatggaggaaagaacggagaccgtcacccgtcgccgtcggcagagtggtttatggggaaagatttgtggagcgtttggcaccagtgactggggctgggaaacctataaagaggatgtgagccgcagtgttatcaatatcaacaccgtcaggaaggaagttatgtcactgacccgggcatatttcggggagctgcaggcatccattgagcaggatattaaccagcccgtccgccaggaaatcgatgcctttttctgcgcattcagggagaaagttgaacaactgcgtaacacgctgattcagagctctgaagatcataaacgcgatcagcaggcacaggaacggcttaccaggcgacttcaggcattaaatgaaagggttcctgagctcattactgacagtaaggcgctgagggaagagctggagacaatgctgtgacttcaccatttattcaacaaattgctgataaccgggtatgtcaggtactcacctgtcttcctgaaaaatttgtggttgatttcgcaaacggaatcgatgttgcacaggagcatatccgcacggccggagagcgcacgttcttccggcgtttaaaagagggactgaccggcgaaggcgctgcacggcagaatgccatcaatgcttcggttgcacagggccttgaggcgtccctgcgctggctgacggagctgacaacgtcacttgccaccacaaactacgcgattacccgggtaaacgacagggtcagttcactggtcagtgatactgccaggctggcgcattattccgcagatacacgggagcagttactcatcctggccgatcaggttcaccataaactgaatcatcttgaagaaaaactccaccgtgttgaccaggttcagcgggcgcagttacatcttgagcagatattctcatggtggagcgccgggcgatatgcgtcattttcccctgccggacgttgttatgtggcgcttgaagagcttcgctggggcgcgtttggtgatgtgatacgtcagggcgaaacaggccaggttaaccagctactggatattctcagacataaagcattaacgcagatggcacaggagagtggcggtagtgcaaccgtgcgtctgaacactctggactggcttggtggtcagggccgggagcaggcagataacgagtggcatgacgcgattaactggctgggagactggtgcagtgaagagcagcatccggtgatctggtcaaccacgcaggctgcagaacacttaccggttcgcatgcctcgcctctgctctgcagaacgcctctctgaaagtatggtcgatgaaatatttcagaagggggctgcatgagtacagaaatgaaaacggggctggtgctgtccggtggcggggcggtgggcgcttatcaggcgggagtggttaaggcactggcagagtgtggtacacagatcagcatggtttcaggggccagcattggcgcattcaatggtgccattatcgcggcctctcccgatctgtcagaagctgccgtacgcctggaggcgctctgggatcatctggggaataatcaggtgctgtcggtaaaccgattggtttacttttcattgctgaaaaaattgttccaggcaatgaacctctgccagatccccggacgtgcaggagcactgcttacgacgcttcttcgccatatatcgatactcaacgggtttgacaatctgatggctcagccgttgttgtcagatgagcccctgacagcgctgttggatcattatcttgatactgatgctctggcagacgggctaccgctgtatgtgtcgctgtaccccacagaagggggcatgcaggatattattgactgcattcgtgctgaactgggtgccggaaccacgaaaaacgccgtttttcagcatatccagagcctgccccgcggacagcagaaagaggctctgcttgcgtcagccgcgctgcccctgctgttccgtccccgtgaggttcaggggacaatgttcggtgatggtggtatgggaggatggcgaaatatgcagggaaatacccctgtgacgcctctggtcgatgccggatgcaatatggtgattgtgacgcatctgagtgacggttctttatgggatcgccaggcttttccggacaccacaatccttgagatccgtccccggaaaaggctgaaatatgcaggtgatggtgacaacagcggcggtctgctcagtttcacgttggcacataccgacgcctggcgtcagcagggctatgaagacacgatgctgacgatggagcatatccggaaaccgctggcagcacgtcaggtactgtcccggtcagaaacggtgttgcagaaaagtctggagataacggaagaggcagatttggcactgagaaacgcgatggcccggattaaataaagacgccccaaagaaacgccaccgcctgtggtggtgtttttcctggctggtgttattgaaaatattttcagatatatattacctgagagaaagttttacccctcacctgtcaattcactcactggaaatttaattatgcaattacctgtaaagttattaatgagccttatatctctggtcagcgttattgcacgtgccgggaaatataaaaattacatccgggatgaaataaaatactggcgatatacatcatacaaggggggggaatttccggaaggtttcactgatgagaaattttccagcgccatttacaacggaagaatatttacaatgaaacgtttacataccctgatgttatttctggcggttctgtttactggctttaacgtggaagcagcgagcgtgaaacaagcgctcagctgcgacccaaacgcccgggctgaacaacctggagcgtgtccaacaacgtacgagttgtacgaaggtgacgctgcctacaaagctgcgcttgacaaagcattaaaaccggtcggactgagcggcatgttcggtaaaggcgggtatatggatggccctggcggaaacgtaacgccagtaaccattaacggtacagtctggctccagggcgacggttgcaaagccaatacctgcggctgggactttatcgtaacactctataacccaaaaacccatgaagtcgttggctaccgctactttggtttagatgacccggcctacctggtttggttcggcgaaattggcgtgcatgaattcgcgtatctggtgaaaaactacgtagctgcggttaactaatttaaggagtctgtcatgaaaacttttatcaaaactttactcgttgctgtaactattctgttctctgtcttcgctacggcgaaacaagtaaaactgccaaacaacatcaaatacgttaatactacagaggcgttttcctgtactgagattgacggtatgaattgccagacgaagaatccgtttaactataaagataacagctatgttttcgtgcttgaacgtggtggtgcctggtgttacgactacactgtctcggtacttaacctgaaaaccgggaaagcacagatgctcgaatacaaagacaaccagctgtgctcaggtagcaacaaaccgttcttcgaaatcaaaaatggcgtaccgacggtaggagtcatcgacacatccggaaaacctgtcgttgtggctctggacaaacttaaaacctgaggagtaaaccatgcgtttctctgcacattattaatatcaaaggtaaatacagccccagccattgttgccggaaagccgcttaatgcgtggctcgccagtgaaaggcttctcagacaataaacctcattcatttcacccgtcaggccgcgtcttctccgggagacgtggcttttttcatttattacaccagtaaatcttaaccaccgataaggagcaaagtatgcgattagcaagtcgttttggttatgctgcaaaccagatacgtcgtgaccgtccactgacacatgaagagctgatgcaccatgtgccggggattttcggggaagagaaacacacgtcccgaagccagaactatacgtacatccccaccatcaccgtactggaaaatctgcagcgggaaggctttcagccgttcttcgcctgccagacccgtgtgcgcgaccagagccgccgggaatataccaaacatatgctgcgtctgcggcgggccggacagataaccggtcagcatgtgcctgaaattattctgctcaactcccatgacggttcatccagctaccagatgttacccggatattttcgtgccatttgtaccaatggcctggtctgcggtcagtcgctgggagaagtccgggtgccacaccggggaaacgtggtggacagggtcatagaaggtgcttacgaagtggtgggcgtgtttgacctgattgaggaaaagcgtgatgccatgcagtcgctggtcctgccgccaccggcacgccaggcgctggcacaggcggcgctgacttaccgttatggtgatgaacatcagcccgtcaccactaccgacattctgacgccacgacgccgggaggattacggtaaggacctgtggagtgcttatcagaccatccaggagaatatgctgaaaggcgggatttccggtcgcagtgccagaggaaaacgtatccatacccgggccattcacagcatcgataccgacattaagctcaaccgggcgttgtgggtgatggcagaaacgctgctggagagcctgcgctgataccgtttccctgaaagcgcagtcctgttcacggctgtcccttcccccagacattccaccattcatttactttttataaggaataatctcatgacaacctcttcgcataattccaccacaccttctgtttccgtggccgctgcatcagggaataaccagtctcagttggttgccactcccgtccctgatgaacagcgcatcagcttctggccgcagcattttggcctcattccacagtgggtcaccctggagccccgtgtcttcggctggatggaccgtctgtatgaagactactgcggtggtatctggaatctgtacaccctgaacaacggtggcgcatttatggcacccgaaccggatgacgatgatgacgaaacatgggtactgttcaatgccatgaacggtaaccgcgctgaaatgagcccggaagccgccggcattgctgcctgtctgatgacgtacagtcatcacgcctgccgtacggagtgttatgccatgacggttcattattaccgtctgcgggattacgccctgcaacatccggaatacgacgccattatgcgcatcattgactgaaagggggcaggaacaatgcaacagatttcctttctgcccggagagatgacgcccggcgagcgcagtctcattctgcgggccctgaaaaccctggaccgtcatcttcatgaacccggtgtggccttcacctccacccgtgcggcacgggaatggctgattctgaacatggcgggactggagcgtgaagaattccgggtgctatatctgaataaccagaatcagctgattgccggtgaaaccctcttcaccggcaccatcaaccgcacggaagtccatccccgggaagtgattaaatgcgccctgtatcacaatgccgcagccgtggtgctggcacacaatcacccgtccggtgaagtcacacccagtaaggcagaccggcttatcaccgaacgtctggtacaggcactgggcctggtggatatccgggtgccggaccatctgatagtcggtggcagccaggttttctcctttgcggaacacggcctgctttaacccgtcaccgccacaatcacatcacacctgttttcacttttatcttctgtcttcaaaggtatcctattatgaaaattatcacccgtggtgaagccatgcgtattcaccaacaacatccgacatcccgtctttttccgttctgtaccggtaaataccgctggcacggcagtgctgaagcgtataccggtcgtgaagtgcaggatattcccggtgtgctggccgtgtttgctgaacgccgtaaggacagttttggcccgtatgtccgactgatgagcgtcaccctgaactgagtgggaattctgatgagcagaattatcgccaccaccggaccattcttaaccgattttctgtagggattttatcgtgtcagacacactccccgggacaacacttcccgacgacaatcacgaccgcccctggtgggggctaccctgcaccgtgacgccctgtttcggcgcccgtctggtgcaggagggtaaccggttgcattaccttgccgaccgtgccggtatcagaggcctgttcagcgatgcagatgcgtaccacctggaccaggcctttccgttgctgatgaaacaactggagctcatgctcaccagtggtgaactcagcccccgctatcagcataccgtcacgctgtatgcgaaaggactgacctgcgaagccgataccctgggctcctgtgrttacgtttatctggctgtttatccgacgcccgaaatgaaaaattaactctccagaatagccttctgctacggcctggtgttttcaccacgcaactttcccatttttatatctgcatatcaggaaaatcttcagtatgaaaacattacctgtattacccgggcaggcggccagttctcgcccgtctcctgttgaaatctggcagatactgctgtcccgactgctggaccagcactacggcctcacactgaatgacacaccgtttgccgatgaacgtgtgattgagcagcatattgaggcaggcatttcactgtgtgatgcggtgaactttctcgtggaaaaatacgcgctggtgcgtaccgaccagccgggattcagcgcctgtacccgctctcagttaataaacagcatcgatatcctccgggctcgcagggcgaccggcctgatgacccgcgacaattacagaacggtaaataacattaccctgggtaagtatccggaggcgaaatgatgacactggaagccgacagcgttaacgtacaggcgctggatatggggcacattgtcgttgacattgatggtgttaatatcactgaactgattaataaggccgctgaaaacggttattcactccgcgtggtggatggccgtgactctaccgaaacaccggcaacttatgccagccctcaccagttgctgtaagacaatgcagtgatacagggtatagtgccattaaccacagaaacagcactgttgtcctgtattaagcaggcaagagaagatgtccttaccctgcgccatctgcagcttctgcaccagaaccggtgaatctcactcaacaggcttcatttcccctgacgccagcctgaatacagctggcgttttcatttataaacagaaaggaaaaccgataataatggaatggacgccccgaccatgaagcaacggtaggatattactgataaaccttccagtggaggtgcgttatggccgttttaacgattagcattgacctgacaaaaaatgaattccaaatccacggtctgggtaggaacagaaaaatctaagctcagaaaacggattaaagtaagcgtcaacggagcaccgtattgacgcttatttattggtgagaactacgttccatggcaggagttcgtcaacacggttggagggccattccggcagtatgctcagaatatggcgcagatacgcttccggatcgataccgttcagacggcaggtgcctgcttttccggcaacaagcaggaatctcagcgctgaagcaggaattagaggtaaaaacgccctaccgggccatgaatcacccggtcattggagtagtaaccaaagcagatttagccagcatggaacaaatatctttggtgaaaagttggttacgggaagctggagcgcacaacgtgttagtaaccagtgcagttaataacaatggagttacagaactttttgccttgctgcatacagaagaaggctgttgttaatttcgattggttctcagatgagaatgatgacggtgatacacagataagaatcaatgagcaatgagggttgccgggcaaccctcattgaataaaacgggaattacttcgcttcgccgtttttcatttcgcccatagctttcagctttttggagatatcgcggcgttctttggagagctcggcatttttgatgatgtaatcgtcaacgcgatcttcatagtcacctttcatgctggcgatgatgccctggattgcttcaacgctcatccctggcttgatgtaatcgctcaggttgtccagcaacaggacgcgcttctggttgtcacggatctttttctcaacgtcctgaatttcacgttgcagtttgttcttacgacggaacagacgaacaaattccagtacgtcctggaatgaaggcttggtagtttccatttttatacccctgataatgtgagagtcggattcgtttaagcaaccgctattcgttagggccaacattactcatagctgccgcagatgacaatgcttttatcccttttcactatcataccctttatccttgctgaatcgaagcagcagcaagatgattctgaagttcaggaattatttgcgcaaggcccggcaaatcagattcgatagcaactcaagctgatgtgccgtttccatgttcagccacacataaccatagattggtgtttccacgactttcagatcatggtggttatcgagcaactgacgcagctcttccacagcatcgttcaatttttccgtattggcaaaaaccggctgcggattaccttcgtacagcgcatgaacaaggctcagcagtatttgctgcatcatgtgctgggtatcacgaagtttttgcgcgttcaataacacgaaatggctggggcgcgtggcccagtatgcattgatttgcaactccagcatacaaaccagattgcgattaatggtctggataccttcatatatcgatttgggaatacgggtttctttgctggcgggcgcaatcagcccacgcattttcacggcatcggtcagcagtttttgtagatggctttccagacgtgggcgttcgagtaagttcggtgagaatgcagattgatagacccgattatactcggtcagacttttcgccagttgaatgcgccagtggatgaacgcccgttgtggccagataccggtaaacaacattgccagtaaagagccgaggatcacatcgccgcttcgccataacgccgtatcaatttcacctgtcggggaacccacaacaattgccagcgtcaccccaatcaataatccttgatacggtttcttgcccagcgccagccaaccgcaaagaaacatcgccgccgcgcaccagactaacatcagcggtaacgaaattaactccagttgcagagcgataagacctaaaatcgaacccaacaccgtaccgccaatacgttcgaaggcacgagggacaacgttcccccagaacgagattggccccataatcaccaccatggtgaccagcggccaggtgctttccgggatagtaaacaggcggataatgagaaaagtgagcaggaatgccagcgcgacccgagtaccatgcacaatgcggtaatggcggtatacccggatttcaaacgggcttaatgacttatcggcacgcacgcagaaactccgtaatgaagattaaaagcgctcataacacatctgtcggccagaaggcgcgcctctgagttatccgacggacataccgggaacagtgtaatttcccggcaggagcgaaaaatttgaaaggcgcatcttactcttttcgctttcaaaaaaagagtggtcttcgcgtcaacacaccgccctgagatgaattagtgatgttttggctgcaccgcaacatacatttcgatatcccagtacccatcttccgcgccattgttcaagtaaacctcgaagcagggctttggtaacatttcataggcactgtcctgcaagaggctattaaagaactgataccagggtttagcaaaatcatcaccgactacacgagccaccgccaccgcatactgaccacctgaaatttctgtcagaatgacgccctcactgttttcggggagcgtaaagttattcggcaccgtcacgacggtgtcgcagcgtaatttttcggcgggtgtttcatctggattgtcgtaatagacagcaacccactccttcggcacaatatttttgctatctatccacatcatcaactgctcaaagcctttctttaccgtctgttcccacgggccaacgagatggaaacctgcaacggtacgtttatcttcctgcttaatctcgtagttcatgacgcccccattaatactgtttttatatacagtatagttgcaatattaaaaccacaaggaatgagtgttgattatgcgagcagattcgcactcctgccagtctgctgcaaaagaaaggtcagtccttatggtggaaataatcactcagccgggaaaacatgctgccttccccgacagattccagggtaaccagcggccagtgcgccacctgtttatcacggtcgtaaagttcaatttcccctacccgctgatgggcgctaattggcgcggtgagttctttaccatcaagggtatatttggctttgatatgtggaatttcggctttcggtagcaccatccagaactcttgttccgttcccagggcgatattttctttatcgccataccagatgcgttccgtaccaacctttttcccacggtgcaaaatttgcaccgtagtaaagttttgttgaccccaacgcagtaattttcttgcctcttcctcacgaccttttgcgctgtcagcccccattaccactgcaatgagacgacgctgcccatctacagccgaagcaatgagattaaacccggcaccagaagtatgacccgttttcaggccgtcaacattcatggttttatcccacaataacccgttacggttttgctgggtgataccgttccaggtgaggcttttctcactgtacatatgataaaactcgggctcgccgtggatgatagcgcgagaaagcacagctaaatcataagccgagctatgctggccaggtgcatccagaccatgcactgtttcaaaatgcgtatccttgagatgcagcttctcggcatagttgttcatcatttcaacaaactgccgttgcccaccggcaatatagtcagccagtgcaacacaagcgtcatttccggaatccacaattaaaccacggcttaaatcacgtaccgatacgcgatcgccctctttcaaaaacatcagtgaagaaccgacaaacaccggattatctttcgcccacgcatcacgccccacggtgacaatatcgtctggcgtaatgcgatgactatcgatagcgcgatccacgacatagcccgtcatcagctttgtcaggctggcgggattgcgctgttgatgctcattacccgcggtgagaatctgaccggtggtgtaatccatcaatacccaggacccggcatgaatctctggaggttgaggtgaaaaaggaatgttttccgccgcaaaaccagacgataaattaaaaacgaacaaagaagcagcaataataagacggcgtttcaacagcaaaccctcaggagtttcaaatagctgttctttttacggaaatacttatgaactggctggaataaagtgcaagaaaatgtgactaccctctcatttttatctgacatgatctgttgccactcgctgccaaattgtcgcgctaaagctgattagcacggtgatatttgatactctggcagacagcagaaacaacggatttaacctaatgatgaatgacggtaagcaacaatctacctttttgtttcacgattacgaaacctttggcacgcaccccgcgttagatcgccctgcacagttcgcagccattcgcaccgatagcgaattcaatgtcatcggcgaacccgaagtcttttactgcaagcccgcggatgactatttaccccagcctggagcagtattaattaccggtattaccccgcaggaagctcgggcgaaaggagaaaacgaagccgcatttgccgcccgtattcactcgctttttaccgtaccgaagacctgtattctgggctacaacaatgtgcgtttcgacgacgaagtcacacgcaacgttttttatcgtaatttctacgatccttacgcctggagctggcagcatgataactcgcgctgggatttactggatgttatgcgtgcctgttatgccctgcgcccggaaggaataaactggcctgaaaatgatgacggtctaccgagctttcgccttgagcatttaaccaaagcgaatggtattgaacatagcaacgcccacgatgcgatggctgatgtgtacgccactattgcgatggcgaaactggtaaaaacgcgtcagccacgcctgtttgattatctctttacccatcgtaataaacacaaactgatggcgttgattgatgttccgcagatgaaacccctggttcacgtttccggaatgtttggggcatggcgcggcaataccagctgggtggcaccgctggcgtggcatcctgaaaatcgcaatgccgtaattatggtggatttggcaggagacatttcgccattactggagctggatagcgacacattgcgcgagcgtttatataccgcaaaagccgatcttggcgataacgccgccgttccggttaagctggtgcatatcaataaatgtccggtactggcccaggcgaatacgctacgcccggaagatgccgaccgactgggaattaatcgtcagcattgcctcgataacctaaaaattctgcgtgaaaatccgcaagtgcgtgaaaaagtggtggcgatattcgcggaagccgaaccgtttacgccttcagagaacgtggatgcacagctttataatggctttttcagtgacgccgatcgtgcagcaatgaaaattgtgctggaaaccgagccgcgtaatttaccggcactggatatcacttttgttgataaacgaattgaaaaactgttgttcaattatcgagcgcgcaacttcccggggacgctggattatgccgagcagcaacgctggctggagcaccgccgccaggtcttcacgccagagtttttgcagggctacgctgatgaattgcagatgctggcacaacagtatgccgatgacaaagagaaagtggcgctgttaaaagcgctttggcagtacgcggaagagatcgtctgaaacaaaaaagccggagcgacaaactccggctttttgagatttaccggatgattatgtcatccggtttgtaagattacgctacgtcttcgtactgcggaaccgggttacggaaactcttggttacgcaagccaggtaaatcagaccgatagcagcccagatcagacccagaaccattgagctttcttccaggttaacccacagcgcaccaacggtcagcgcaccacacatcggcaggaacagatactggaagtgatctttcagcgttttgttacgcttctcacggatccagaactgcgagatgaccgacaggttaacgaaggtgaacgccaccaacgcaccaaagttaatcagcgccgtagccattaccaggtcgaagttgattgccagcagggcaatcgcgccaaccaggatgatattcatcgccggagtacgccatttcgggtgtacataaccgaagaagcttttcgggaacacgccgtcacgacccattacgtacatcagacgcgcaacgcctgcgtgcgccgccataccggacgccagtacggtaatggtggagaagatcagcgcgccaacctggaacgctttacccgcaacgtacagcatgatttcaggctgtgacgcatccggatctttaaaacgagagatatccgggaagtacagctgcaggaagtaagttgcaaagatgaagatcatgccgccgatcagcgcggtcaggaaaatcgcacgcgggatcacgcgctctgcatctttggtttcttccgacaggttgctgatgccgtcaaaaccggtaaaggagaagcacaggattgtcgccccggtaatcatcgggataacatgcgcatcgccagaccagaacggacgagtgctcgccagcgtaccagcgccttcaccttcaaatacgccataaacaaccatgcccagaatcaccgcgatcagcactatctgcaacacgacgattacagtgttgaagttcgctacggatttcagactacgcaggttaaaggcggtcataaaggccaccagagccaccacaaacatccacgatggaatggaaggcaccagagcttcaaaatagattttcgccagcagaatgttgatcatcggcgcgaacagatagtcgagcagagaagaccaacccaccataaagccgacagtcgggctaatggatttctgggcgtaagtgtatgcagagccagcagaaggatagcggcgaaccagcttcccgtagctcagagccgtaaacaggatcgcaatcaatgcgaacgcataggctgtcggcacatgaccatccgtgaggcctgaaacgataccaaatgtatcaaacagcgtcatcggctgcatataggctagacccatcattacaaccggaactaacgtaagcgttttacgcaattccacgcgagaggtgtttggagtaacgttatgcgacatggtcattctcctttacggtgataaccgtcgcgtaagcaaaaaattgccccatttttttggattcctcagcgacaacaactgtcgatttttagtaaatatctatccggtacgaagcccggcctcttggtatgaatgattggtttgaagcaaaaaataaccgacgctaattaaacgtcggtttttagtcattttttgacagcggcgcattgtgcctaaatgggggggaaatgacaagagaatgagaggcttgccataataatttttctttaaatggctgattttccgtcatcagattttgcataaacaccggcgatcgcactatttgctaaaatttcatctcgccaccagccgctggcaagccctgcggtctgttcattccagccaatccagacgggttcaaagagagtttgggcgaccactttcttctcgattaacgcgccactatcgagaaaacgttgcgccagataccgtggtaaatagccgcagccaaggccgctaatttgcagctccagcttggttttaaaatcgaaaacggtaatggcttcttgttcgtcgagaagttgtgaggccgtagaagcgcctgcctgcgcagtgtcccccaccacaatcgcccgatatcgtttaatgatacgacggtttaacggttcttcttcctgggctaacggatgatgaggcgcgaccgcaaagacttgttcaagatcgcccaaccgcgagaaaccaaactcactggaagatggtggctcatgcatcgcgccaacgataatatccgctcgcccctgagtcagggcatcccaggaaccaccgagtacgccattgataaacttcaggcgcgtcacgctatgatgttgataaaaagcttcaatgagaggcgcaagcagagaaaaaggaaacgtgtcgtccacgccaatcaccagctcgttttcccagccttcatgcagtttgatcgcctgcttttccagttctcgcacggtatgcagaacttcccgccctttctctaataacatttttccggtacgggtgaatttagcgcggtgtccgctacgatcaagcaattgaatattaaggtcgctttccagcttgtgaacggtgtaactcagagcggacggcgtcttgtagagtttggctgacgccgccgcaaaactgccttctttttctaaggcatcgaggatcatcaacacatccagcagtggtttcatacacgcccccttgcagtgcatgcggcgtcctgctggcgtgatcgtttactccagcggcattaccagcggatcgggatactggtattcaaatcccagttcattacaaatccgactgccatcaataatcttacctttgccgctgtccagactatttctgaactgcggaggttccagccccagtaaacgggccatctgcggatagaaaacattacgcgcagggtgagctagcgcacatatattatagatgtgtccgcctttaggtgcctgtaacaacagagtgatagcgccaataacatcttctaaatggactaaattaacaccatgttcaccatcaggggcggtttttccggcaaagaagcgtccgggatgacgtcccggtccgaccaggcccgcaagacgcagaatatcgaccgaagtaccgggtaaattgtgcagccagtcttcgagttcttctaatactcgtccactgttggtcaccggattacgcggggtggtttctttcaccgtgccttgcgcgtcgccatagacagatgtcgagctggtaaaaataatgcggggaatacgatgggccagcgcgctatccactaactcttgtaccgcttgtaaatagaactcatcgccggggccgctacgacgtgccggaagcgtaatgaccagcgcatcggcatccatcagggcatccagatcgtcagaatcgcaaactaactcaggctccatgcgaagcagatagctatcaatgccactcattcgggccgcttcgacaccatcttgtgtggttttactcccggtgacttgccagcctcgcgctgaaagtgacatcgccagcggcatgcctaaccaccctaacccgacaattgcgacctttttcatccgttatctcctgatacaccttagatctataaggctacgctagcgtatcaaaactgacaattcattctatgaatgaatctgttcaataatgataacgacatgctgcaatgagcagtgaatcgtcggtaaccgcgtataccagacggtgctcctctgtaatgcgtcgggaccagaagcctgacaaattatgtttcaggggttctggcttccccttaccttcaaatggtgttctgcgtgtatctttgataatttcattgatctttttaacaattcgcttatctgtttcctgccagtacagataatcatcccatgattcctcagaccagattagtttcactcaataatgtccttttccgttcctttgcctgatttcaggctatcgattgagtccatcaatctccgggcgttagcgggggaacgcagtagataagccgtctcttccagcgagttgtattcttcgagtgacatcagaacacaagcctctccattctgacgagtaatgaggatcggggcatgatcttcaacggctttcatcattgttgccgacaaattctgacgcgcttcgctgtagctaattgtacgcatgtaaatctcctcttttgtacagttcattgtacaatgatgggtgttaattaactatttattaattagtttgtagatcaagacattgtcagcgagacgaaaaatcagactttgctctttttggtgctgtcaagttagaggacagtcctcttagccccctcctttccccgctcattcattaaacaaatccatcgccataaaatatataaaaaaccccttgctttctaacgtgaaagtggtttaggttaaaagacatcagttgaataaacattcacagagacttttatgacacgcgttcaatttaaacaccaccatcatcaccatcatcctgactagtctttcaggcgatgtgtgctggaagacattcagatcttccagtggtgcatgaacgcatgagaaagcccccggaagatcaccttccgggggcttttttattgcgcggttgttaacggttcagacaggtttaaagaggaataagaaaatgacagacaacactcgtttacgcatagctatgcagaaatccggccgtttaagtgatgactcacgcgaattactggcgcgctgcggcattaaaattaatcttcacacccagcgcctgatcgcgatggcagaaaacatgccgattgatattctgcgcgtgcgtgacgacgacattcccggtctggtaatggacggcgtggtagatcttgggattatcggcgaaaacgtgctggaagaagagctgcttaaccgccgagcccagggtgaagatccgcgctactttaccctgcgtcgtctggatttcggcggctgccgactttcactggcaacgccggttgatgaagcctgggacggtccgctctccttaaacggtaaacgtatcgccacctcttatcctcacctgctcaagcgttatctcgatcagaaaggtatctcttttaaatcctgcttactgaacggttctgtcgaagttgcgccgcgtgccggactggcggatgcgatttgcgatctggtttccaccggtgccacgctggaagctaacggcctgcgcgaagtcgaagttatctaccgctcgaaagcctgcctgatccagcgcgatggcgaaatggaagaatccaaacagcaactgatcgacaaactgctgacccgtattcagggtgtgatccaggcgcgcgaatcaaaatacatcatgatgcacgcaccgaccgaacgcctggatgaagtcatcgccctgctgccaggtgccgaacgcccaaccattctgccgctggcgggtgaccaacagcgcgtagcgatgcacatggtgagtagcgaaaccctgttctgggaaacgatggaaaaactgaaagcgttgggtgccagttcaatcctggtcctgccgattgagaagatgatggagtgatcgccatgagctttaacacaatcattgactggaatagctgtactgcggagcaacaacgccagctgttaatgcgcccggcgatctccgcttctgaaagcattacccgcaccgttaacgatattctcgataacgtgaaaacgcgtggcgatgaggccctgcgtgaatacagcgcgaagtttgataaaaccacggttaccgcgctgaaggtgtctgctgatgagatcgccgccgccagcgaacgcctgagcgacgagctaaaacaggcgatggcggtggcagtaaagaatattgaaaccttccacactgcgcaaaaactgccgccggtagatgtagaaacgcagccaggcgtacgttgccagcaagtcacgcgtccggtagcttcagttgggttgtatattcctggcggctccgccccgctcttctcaacggtattaatgctggcgactccggcgcgtattgcgggctgtaaaaaagtggtgctgtgctcaccgccgccgatagccgatgagatactttacgcggcgcagctgtgcggtgtgcaggacgtgtttaacgtcggcggtgcacaggccattgccgcgctggcgtttggtacggaatctgtgccgaaagtggacaaaatcttcgggccgggtaacgcctttgtcaccgaagcaaaacgccaggtaagccagcgtctggacggtgcggcgatcgatatgcccgcaggcccgtcggaagtgctggtgattgctgacagcggcgctacgccggatttcgtggcttctgatttgctttctcaggctgaacacggccctgactcacaggtaattttactgacccccgacgccgatatggcgcgtcgcgttgccgaggccgtcgaacgccaactggcagaactgccgcgtgccgaaaccgcccgccaggcactgaacgccagccgcctgatcgtgactaaagatttagcgcagtgcgtggagatctccaaccagtacggcccggagcacctgatcattcagacccgcaacgcccgcgaactggtcgatggcatcaccagcgccggttcggtatttcttggtgactggtcaccggaatcggcaggcgactacgcctccggcaccaaccacgttctaccgacttacggctacaccgccacctgttccagcctcgggctggcagatttccagaagcgcatgaccgtacaggaactgtcgaaagaaggcttttccacgctggcttcgaccattgaaacactggccgccgccgagcgcctgaccgcccacaaaaatgccgttactttgcgtgttaacgcccttaaggagcaagcatgagcaccgtgactattaccgatttagcgcgtgaaaacgtccgcaacctgacgccgtatcagtcagcgcgtcgtctgggcggtaacggcgatgtctggctgaacgccaacgaatatcccactgccgtggagtttcagctcactcagcaaacgctcaaccgctatccggaatgccaaccgaaagtggtgattgaaaattacgcgcaatatgcaggcgtaaaaccggaacaggtgctggtcagccgtggcgcggacgaaggcattgaactgctgattcgcgctttttgcgaaccgggtaaagacgccatcctctactgcccgccaacgtacggcatgtacagcgtcagcgctgaaaccattggcgtcgagtgccgcacagtgccgacgctggacaactggcaactggacttacagggcatttccgacaagctggatggcgtaaaagtggtctatgtttgcagccccaacaaccccaccgggcaactgatcaacccgcaggattttcgcaccctgctggagttaacccgcggtaaggcgattgtggttgccgatgaagcctatatcgagttttgcccgcaggcatcgctggctggctggctggcggaatatccgcacctggctattttgcgcacactgtcgaaagcttttgctctggcggggcttcgttgcggatttacgctggcaaacgaagaagtcatcaacctgctgatgaaagtgatcgccccctacccgctctcgacgccggttgccgacattgccgcacaggcgttaagcccgcagggaatcgtcgccatgcgcgaacgggtggcgcaaattattacagaacgcgaatacctgattgccgcactgaaagagatcccctgcgtggagcaggttttcgactctgaaaccaactacattctggcgcgctttaaagcctccagtgcggtgtttaaatctttgtgggatcagggcattatcttacgtgatcagaataaacaaccctctttaagcggctgcctgcgaattaccgtcggaacccgtgaagaaagccagtgcgtcattgacgccttacgtgcggagcaagtttgatgagtcagaagtatctttttatcgatcgcgatggaaccctgattagcgaaccgccgagtgattttcaggtggaccgttttgacaaactcgcctttgaacctggcgtgatcccggagctgctgaggctgcaaaaagcgggctacaagctggtgatgatcactaatcaggatggtcttggaacacaaagtttcccgcaggcggatttcgatggcccgcacaacctgatgatgcagatcttcacctcgcaaggcgtacagtttgatgaagtgctgatttgcccacacctgcccgccgatgagtgcgactgccgtaagccgaaagtaaaactggtggagcgttatctcgctgagcaagcgatggatcgcgccaacagttatgtgattggcgatcgcgcgaccgacattcaactggcggaaaacatgggcattaatggtttacgctacgaccgtgaaatcctgaactggccgatgattggtgagcaactcactaaacgagaccgttacgcccatgtagtgcgcaacaccaaagagacgcaaattgacgtccaggtgtggctggatcgcgagggtggcagcaagattaacaccggcgttggcttctttgatcacatgctggatcagatcgctacccacggcggtttccgtatggaaatcaacgtcaaaggcgacctctatatcgacgatcaccacaccgtcgaagataccggcctggcgctgggggaagcgttaaaaattgccctcggcgataaacgcggtatttgccgctttggttttgtgctgccgatggacgaatgccttgcccgctgcgcgctggatatctctggtcgcccgcacctggaatataaagctgaatttacctaccagcgcgtgggcgatctcagcaccgagatgatcgagcacttcttccgttcgctttcatacaccatgggcgtgacgctacacctgaaaaccaaaggtaaaaacgatcaccaccgtgtagagagcctgttcaaagcctttggtcgtaccctgcgccaggccatccgcgtcgaaggcgacaccctgccctcgtcgaaaggagtgctgtaatgaacgtggtgatccttgatactggctgcgccaacctgaactctgtgaagtctgccattgcgcgccacggttatgaacccaaagtcagccgtgacccggacgtcgtgttgctggccgataaactgtttttacccggcgttggcaccgcacaagcagcgatggaccaggtgcgtgagcgcgagctatttgatctcatcaaagcctgtacccaaccggtgctgggcatctgcttagggatgcaactgctcgggcgacgtagcgaagagagcaatggcgtcgacttgctgggcatcatcgacgaagacgtgccgaaaatgaccgactttggtctgccactgccacatatgggctggaatcgcgtttacccgcaggcaggcaaccgcctgtttcaggggattgaagacggcgcgtacttttactttgttcacagctacgcaatgccggtcaatccgtggaccatcgcccagtgtaattacggcgaaccgttcaccgcggcggtacaaaaagataacttctacggcgtgcagttccacccggagcgttctggtgccgctggagctaagttgctgaaaaacttcctggagatgtgatgattattccggcattagatttaatcgacggcaccgtggtgcgtctccatcagggcgattacggcaaacaacgcgattacggtaacaacccgctgccgcgcttacaggattacgctgcgcaaggtgccgaagtgttgcacctggtggatctgaccggggcaaaagatccggctaagcgtcaaatcccgctgattaaaaccctggtcgcgggcgttaacgtcccggtgcaggttggcggcggtgtgcgtagtgaaaaagacgtagcggcgttactggaagcgggcgttgcgcgtgtggtggtcggctccaccgcggtgaaatcaccagaaatggtgaaaggttggtttgaacgtttcggtgcggatgccttagtgctggcgctggatgtccgtattgacgagcaaggcaacaagcaggtggcggtcagcggctggcaagagaactcgggcgtttcactggaacaactggtggaaacctatctgcccgtcggcctgaaacatgtgctatgtaccgatatctcgcgcgacggcacgctggcgggatctaacgtctctttatatgaagaagtgtgcgccagatatccacaggtggcatttcagtcctccggcggtattggcgacattaacgatgtggcggccctgcgtggtactggtgtacgcggcgtaatagttggtcgtgcattactggaaggtaaattcaccgtgaaggaggccatcgcatgctggcaaaacgcataatcccttgtctcgacgttcgtgatggtcaggtggtgaaaggcgtacagtttcgcaaccatgaaatcattggcgatatcgtgccactggcaaaacgctacgccgaagaaggtgcagatgaactggtgttctacgatatcaccgcttccagcgatggccgtgtggtagataaaagctgggtatctcgcgtggcggaagtgatcgacattccgttttgtgtggcgggtgggattaagtctctggaagatgccgcgaaaattctttcctttggcgcggataaaatctccattaactcccctgcgctggcggacccgacgttaattactcgcctggcggatcgctttggcgtgcagtgtattgtggtcggcattgatacctggtacgacgccgaaaccggtaaatatcatgtgaatcaatataccggcgatgaaagccgcacccgcgtcactcagtgggaaacactcgactgggtgcaggaagtgcaaaaacgcggcgccggagaaatcgtcctcaacatgatgaatcaggacggcgtgcgtaacggttacgacctcaagcagctgaaaaaagtgcgtgaagtttgccacgtcccgctgattgcctccggtggcgcgggcaccatggaacacttcctggaagccttccgcgatgccgacgttgacggtgcgctggcagcttccgtattccacaaacaaataatcaatattggcgaattaaaagcgtacctggcaacacagggcgtggagatcaggatatgttaacagaacaacaacgtcgcgaactggactgggaaaaaaccgacggtctgatgccggtgattgtgcaacacgcggtatccggcgaagtgttaatgctgggctacatgaacccggaagccttagacagaaccatcgaaagcggtaaagttaccttcttctcgcgcactaaacagcgactgtggaccaaaggcgaaacctcgggcaatttcctcaatgtggtgagcattgcgccggactgcgacaacgacacgttactggtgctggcgaatcccatcgggccaacctgccacaaaggcaccagcagctgcttcggcgacaccgctcaccagtggctgttcctgtatcaactggaacaactgctcgccgaacgtaaatctgccgacccggaaacctcctacaccgccaaactgtatgccagcggctccaaacgcattgcgcagaaagtgggcgaagaaggcgtggaaaccgcactggcagcaacggtacatgaccgctttgagctgaccaacgaggcatctgacttgatgtatcacctgctggtgttgttgcaggatcaggatctggatttaacaacggtaattgagaacctgcgtaaacggcatcagtgagtggcgtgctgagcaggtgtgatgttgttgtcacacccggagccattgcccgatgcgcaagccttatcgtgcctacacattatctcaacacacgtaggccggataagatgcgccagcatcgcatccggcaaaaaaaacgggcatggtgtcaccaccctgcccgtttctcttaaatgcacaataatattatttcgcgttgtaattacgcagcgcgttacgcccaagcacaatccccgcgccaaccatgccgcccagcagcacagccagaatcaaggtaattgctttcttcgggctatcgcgacgaataggtaacgtcggtttcattacatagcggtaagcatgaatatcaagtttatcaacgtcaagattgtcaatatccagcaggttttgacgagtctgatagtagtttgatgagaacaccaacggacgggtcgcttcgtgcttaatcatcgactccagcgcttcgctccccaaaagaaacatagtatcctgggttacgtcctgtgtctgttgaatctgcggctttgtcacctgcgcctgattcgcatactgcaacgcttcctgaatctgacgaatacgcagatctttctgctcctgcgcgaccacttcctgggttcttaaagagtcctgcaagtttttccgtcccagaacaatgttgtccttgagatccttttctagctcttgattcactttatcatcaacttgctgaatgtattgggccaacttcatttgtgcgccctctgcagtttgcccaacataagaaacagtcaatggtaattgctggttcttaacagaagattcgatggtaagtttttctggctcttcctgattatccagcgtttctgctaatgcagagaaggcagaactgaagcgaccaattaacgtctcctgcaaatccgatactttcggtgcagcctgaccatagataacattcatggcattgttatagccagcaatttgccccacgtcgggctgagtgataattgctgttgacgtccatttctccttcgctactgccaaataaccaatagccagggcaatagccacaatgacggaaatgataattgtcatcttgccacgccacaactgcactagtaaatcaatcaaatcaatctgttccgggtcatggttttgcccagaaacattattattttctactctcatcattaccctaactgacggaaatttccaagtccgcatagtttagcgataatccccgtgaatgctataggataagtgataaaaataatgaattattgcggaggtaacaaaagacaatcagggcgtaaatagccctaacaagatgttagtcgctgccaaagagatcgcgggtgtagaccttatctgccacatccttaagctcttctgccatacggttggagataatgatgtcggcttgttgtttgaaggtggcgagatcacgttccaggcgagagttgaagaatgagtcttctttcatcaccggctcgtagatgatcacttcaacgcctttcgccttgatacgcttcataatcccctgaatagaagacgcacggaagttatctgacccgctcttcataatcagacgataaatacccaccacttgcggtttgcgtgacaaaatggcatcggcaataaaatctttacgcgtgcggtttgcatcgacaattgccgagatcaggttattcggcacagactggtagttcgccagtaactgcttggtatctttcggcagacaataaccaccataaccaaacgacggattgttgtaatggttgccaatacgcggatcgagacaaacgccttcgataatctggcgagtattcagacctaaactttctgcatagctatccagttcattaaagtatgctacgcgcatcgccagataggtattagcgaaaagtttaatcgcttctgcttcagtggagtcggtaaacagggtcgggatattttgcttaatcgcgccttcctgtaacaacgcagcaaaacgttctgcgcgttctgaacgctcaccgatgacaatacgtgacggatggagattatcgtaaagggctttaccttcgcggaggaattccggagagaaaataatattttcagtacgatatttcttatgcatcgctgcggtaaaaccaacgggaaccgttgatttgatgaccataaccgcataaggatttatctcaactacgtctttaattactgattctacactggatgtattgaaataattagttttaggatcatagtcggttggagtggcgatgatgacataatcagcatcccggtaggcttcatttttatctaatgtggcattaaagtgtattttatctgattgcaaaaactgctgaatttccttatcaacaataggagatatccgatcattcagcatagcaacgcgtgacggtaaaatatctaatgccacaacctcatgattttgtgcgattagaagcccgtttgacaagcctacatagccagtaccggaaatggtgattttcatttcatgctctcagaattaacttaactgtgaatcatgatgtttttagcatcctgataagagctaaaagttttaacgctacgttgttcgatggtcaacgcaacgaaaaaaaattcagattttctttataaggatagctgatatttattaagttaatattaagcagtgaaatttagtctataagataattggcaaaaaaaagcccggtgcaatatacgccgggcctcaatttttaatgttggttaaatcagattaatccagccattcagtatggaacacaccttctttatcaatgcgcttataagtatgtgcaccgaaatagtcacgctgtgcctggatcaggttcgcaggcagaacagcggcacggtagctatcgtaataggcaaccgcagcggcgaaggtcggaaccgggataccgttctgtactgcataagcaacgacatcacgcagagcctgctggtagtcatcggcaatttgcttgaagtacggagccagcagcaggttagcgatctgcggattttcggcataagcatcggtgattttctgcaggaactgcgcacggatgatgcagccagcacggaaaatcttcgcgatttcaccgtagttcagatcccagttgtactcttcagacgcagcacgcagctgagagaagccctgagcgtaagaaacgattttgccaagatacagcgcacggcgaactttttcgatgaactcagccttgtcgcctgctggctgtgcttgcgggccagagagaactttagatgcggcaacacgctgatctttcagagaagagatataacgtgcaaacacagactcggtaatcagcgacagcggttcgccgagatccagcgcactctggctggtccatttgcccgtgcctttgtttgctgcttcatccaggatcacatcaaccaggtagttaccatcttcatcttttttggtgaagatatctttggtgatgtcgatcaggtagctgctcagttcaccgttattccactcggtaaaggtctgcgccagttcttcgttggtgaggttcaggccacctttaagcagagaataggcttcagcaatcagttgcatatctccgtattcaataccgttgtgaaccatcttcacatagtgacctgcgccatcggcaccaatataggtaacgcatggctcaccgtcttcagccactgcggcgattttggtcaggatcggcgcaacaagttcataggcttctttctgcccaccaggcataatggaaggacctttcagcgcgccttcttcaccaccggagacaccggtaccaatgaagttaaagccttcggcagaaagctcacggttacgacgaatggtgtcctggaagaaggtattaccaccatcaatgatgatgtcacctttatcgaggtatggcttgagggaatcaatagcagcatccgtgcctgcacctgctttcaccattaacaggatgcgacgaggcgtttccagagattcaacaaactctttcaccgtatagtaaggaaccagttttttgcctggattttcggcaatcacttcttccgtcttttcacgggaacggttgaaaatagagacggtataaccacgactttcgatgttgagcgcaaggttgcgccccatcactgccataccgactacgccgatctgttgctttgacattgtttactcctgtcaggggtggtcaccgcgaagtgtgcggcttaaatgtggtatagatgttaactcactcatagagatactgaatagcattaccttggatataccacaccggatatctcatcttttccgttttttaaaacccatttatatgaaattactgaattacttgttcagtaactcaaggataagttttgtcttttcttccatcagcggtacatcgccgcgcgattccacattcaaccgcaccaccggttcggtgttggaggagcgcaggttaaagcgccagtcggcaaaggtcatgctgatgccatcggtacgatccaccgccagcgcctcacggctaaaatgctgttccacgcggttaatcgcctcaacgggttgcgccagtttgctgttgatctcaccgcttgccggaaacgctgccatccggtcgcgcaccagttcgcccagcgtttttcctttcaggcacaccagttcggcgaccagcagccacgggatcatgccgctgtcgcagtaagcgaaatcacggaagtaatggtgggcgctcatttcgccaccgtagatagcgtcttccttgcgcatacgttctttaataaaggcgtgtccggttttcgacattaccggggtgccgcctgcggcagtcaccacatcaacggtgttccaggagagacgtggatcgtggatgatcttcgcgccgggatttttttcgaggaacgcttctgccagcaggccgacaatgtagtagccctcaataaactgccctttttcgtcaaacaggaaacagcggtcaaaatcgccatcaaaggcaatgcccatatccgcgccgtgtttgatgaccgcattgcgggtgtcgtcgcgacattccggcagtagcgggttaggaataccgttggggaaattgccgtccggcgtgttgtgcactttgattaattccacgggtgcgccgagggctttaaagcgggcttcaatggcgtccaccaccggacccgccgcgccgttcccggagttaatcaccagcttgagcggcgtgaggtttttgacgttgatataaccgaacaggtgatcaacgtaagcgtcacgcagattgatttgctgatagcgaccgcgtttggtttcatcaacgggaggaaagtcgttggcttctgccagacgctggatgtcgcgcagtccggtatcaccgctgatcgggcgagccccttcgcgcaccagtttcatgccgttgtaatccatcgggttatggctggcggtaacttcgatgccgccatccacgccgagatggaacgtggcgaaatagatttcttcggtgccggacatgccaatatccagcacatcgacgcccgcatcctgtaaccccttcgccagcgccagttttaaggtttcgctggtgagtcggacgtcaccgcctaacacaatggttttcggtttgagaaattcgccataagcgcgaccaatgcgccaggcaatatcttcattcagttcttcgcctaatttcccgcgaatatcataggctttaaagcagggtaaactcgacatgatataccttaaacaaataatacttattacagattaactaaaaatattagcgctcttctactaacgttacattatcaaaaatttagctacgaccatatcggtcctgaaaacggataacatcgtcttcttctaaataagatccagaacgaacttcaattaaatcaagaggaattttccctggattttccaagcagtgtattacaccaagaggtatgtaaacagattcattttcgctaagaatcttagtttcagaacctatagtcacccttgcagttccagaaactatgatccaatgttctgccctatgatggtgcatttgtaaagaaagtccttcaccaggatttactgttatacgtttgacctgataacgctcccctgtgtcaatggaatcatatttaccccaaggacgatatacttcgcgatgaacataatgctcgctacgacctgaatttttaatttgttcgactattttctttacatcctgaactttatttctctctgagacaagaacagcatcctttgtttggacaacaactaaattttccactccaactgtagcaacaattcccgattcggcatatatgaaagaattctttgtttcatgagagaaaatatccccaactattacgttgccgtctgagtctttatcattaatttcccaaagagaagaccatgaaccgacatcactccagccagcatccattggaataacaattgcgtcttttgttttttccattacagcgtaatcaattgactcttcaggacacttagagaaagaactttcatctaaacgcacaaaatcaaggtcaaagttcgctgaagcaattgctttttcacaagcggataaaatatcaggccgaaattgtttaagttcctctatataacgatttgcactaaacaaaaacataccgctattccaataatactcaccggaagcaagatatttagtggctgtctcatgatttggcttttcaacaaatgatgacactataaatgcatccgaatcttcctgattaatatattgtcctcgatgtatataaccataaccagtttctgctttgtctggaattataccaaatgttaccaatttcccatcagcagcgtatggaattgccgatctaacagcgttacaaaatttttcttcatcgtgtataacgtgatctgcagccagtacgagcataagatcatctgcacttttatcagacttagacatcagcaacgccgctaatgcaattgcaggggcagtgttacgcccaacaggctcaaggatgatattctttgaagtcaatctatcgatttttctaagctgttcagcaactataaagcggtattgttcattacaaatgacataagggttggtacaatccaaaccatccagacgattagccgttgtttgaagcatggtatgactaccgattaggctaagaaattgtttcggatagagaattcttgatagtggccacaaccgactgcctgaaccaccagccataatgataggtgtaataattttattattgttcatataatttctcatctaatgtattcattaaattggcaacttttgattcccaagaaaaattattttctacaaaactacgggcattttcagccacttcagtataacgattataatcgtaaattatttctcttagtacgtttttatattgctctactgtatctgcaacaaaaatttcgctacctgattttgcattaataccttcataaccaatgctagatgtaatacatggtaaacctaaagccatgtattcaagaattttattttgtacgcctgctccaagacgaacaagacatatacctatatgccctgtagaagcggaagaattgatatcatcaacagtacctaaagcaattgtatttttaaatgaatttaatatatttttattagtttctgagatcttaccaatcactttaaaaataatattaaactcatcatacaagcaaggtaaaatattcttagcaaaatgttttgcagcatccatattttgtaaagaatacatatttccgataaatataagttccacaggcttatcgatttttatttctctttttatatatctcaaggctgatgtatcaaccccattattgactatatggatattactgcccggattagggtagagatagtcacggtctacggatgaaataaaagtggtcaaatcaaaaagattcgccacagaacgttcatatgattctaatcttttttgttccagagaataaataattgcacgcaaactttttttacttgctaattttttaacgcgactgtaattcaaagatattgcatctgtcatatcaagaattttgaacttgtctgtatccttaacataatcagcaactcttatcagatgacaaaatactgcatcgcattgtttaattaatttattgtatttattcttaaatgtgtccgattgataataagcaatttgcaacggtttttgcgtaaccaaagcttttaatacattataatatgatttatattttggtagatagacacgatgaatttctttgaagaccgagtcatttatatttatttcaagttctagtggttgatcacataagctcagaagaataagatcatattttttggaaagttctttacataacatatagactcttaatctatcccctccaatgacagggtagggaaagcgaggtgtaagaaccagtattttttttctctgctctgattgattcataaaactgaaaccttttatattcagaatccgtctggataattttttttccaacgccacgagtccaataacatctgttctagagtttgttcggcttgccagtccaataaagaattagctttatctgcatcagcccaacaagacgcaacatcccctgcccttctctctataaaagatttattgaccttaatgtttgttaatttttcaaatgtagtgattaattcaagcaccgaataaccttttcctgtaccaagattaaagatattatatcccgaattgatacttaaataattcattgcagccaaatgacctttcgctaagtcaacaacatgaataaaatcccttacacctgttccatcattagtagggtaatcattgccataaataaataatttatcacgtttaccactcgcaacatccaataaataaggaacaagattattagggataccagatggagcctcacctattttaccactagaatgagcaccgacaggattaaaatatctcaagcaaattatatccagttttcccgtggaactaacatcctctagaattttttcaacaaaatacttcgatgtgccatatggattcgtagttcctccaattttagctgtttctggaattggaattatctctggttcaccatagactgtcgcagatgagctaaagataaattttttaattctgtactcttccattacctgtaataaagtaatggtcactccaacattattctggtaatactttaagggttcacttttagactctgaaacagatttaaagccagcaaaatgaataactatatctatggcgtgtttctcgaaaatagcggagagtgtcttcctacacccagcatctccagtaattgttataaaatcacgtcgagtaatttcttttattttttcgatacacttgtatgaagcattactgaaattgtccagaacgataatctcatgacctgcattcagtaattcaatagccgtatgagatccgatatatccagcaccaccagttactaatatgttcatattatatctccactaactaatcgtcaaaatttattatatcaagttcatggccattaaaccgataatgtgaataatatttttgctgataagacattattagctgtttattgatacttttcatcttgaaatctttaggaaattcctcatccaaatgtgagatttttttaacacactccttattgtttataatttcatcatagccgattaaggaatgctctgtcgcataaatatataatccatatgatagtgcttctgcaatttttgttttcattccacttcctaaaactataggagaataaaaaacatcacaagcagataataaatatgacatttcactattagatagattatcgaaaaaaaataaattatccaaatcaggaagattcaaagtagtacttttcctacctgccaaaatatagcaataatcattattagactttgctgcatttaaaacatagttggcagcatctatatttggaaaaaaatcaaaagatgcagtaaatactacttttttcctattatcattattcaatcgattatactcattaataaagtgagctgacaatacatcagttggtttttctctactaaatatcacagggagaattaaatttctgctttttttaatcccataaaatttatccattgcatttttatcttgccgggtaatatagctaactaaatctgaattcttaagcccgataaattcattgagataaacaattaatttttcaataaaagtagttatgtttttatctttttgtcttattaagtcatattcgaagttatccgtaaacaatatgatctttttgtggggcatgagtattctaaaaagcagacataacaatccaagccgagagttgtgaaaagcaagaatatcttgcttccgtaaaattttaattattgagaaaatataagggacataaaatgatggtataaaaaaaagcctggatattatatcctgacgtttacctttaataaatgatatatgttgaaaagtattgtcttcgaatagtttacctgaggattttttatcaataagtgttaaattaacattctgtttttgtagaaaactaacaagcgtacgtaaatatactcctcctccggtaagttcattatatgagttaattgaaatgagacagagtttcttattttttttcattaaatgccgccgttaaaatttccgcatatctctcttcagaaaaaagctcacgcttgctataaatagtttgtctcaaatgataatatttttcattatcaagactaattaatttgtaggctacttgtgctaaatcttctttattattggcaataaatacgccaggaaaactttctgcatacaactctctaattgcaccaacattatagcctatcacagggcaaccacagcatagcgcttcaatagtaaccagctcatatccttcataataggacggtaaaataagtactctggatttcttaaatatttctggcattttcgcataggggacagcaatgctggtcagaacattatttagcgaagcaaaattttgtggggcgggaatacttgaaactaaatggaaggaagtatctggcagatttttacatatgtaatacagatcatctattccttttcctttttccaatcgcccgacaaatgtcacatattctgcttcattaacatcagtgtaatcaaattgtgcaagatttataaaatttcgaacaactttgattttatgtgaattaatattgtaaagctcattccattcacttttaaccttatttgaaacagcccagatattttttgaaaatgctccagcccaacgctcatagaaagataaaagaccactgccagacaaccgattaggttttttattcatgactgtttgaaaataacatttcatattgccatgagctattaagatgtcattcctataaaaaggagaacaatagccatgtgcaataactttaaacgtcacgccacgtaatttttgtaaggttaaataaagagaaactaatattggataaagtgctacttgtatttttttgttacgaattttgttagaaattttgaagtatgttttatcaagtataatgactttaacccccaaatttttaagaatgttacattgttgggcaacaaccctttccaccccaccttgccctcctgaaccattatacgcggcgatatatataatcattttaaaaacttcccgataaacgacttcatttttagcagaacgaattgacactgtcggtaaaatatagcatgcttttgtcctgaaagaagattcaaattatcattatatttttttaaaaatctataattatttatgcaactttcgtaatgatattttaatcgattagctgttcttgcccctcccgtcgcttttcttggaggtaaatttattaacaaagcctttgaatcatatataaattttttatttttaataaatagagatagcatgaaatcagtttcctcacgatagcagtttcccgtataagatatatcaaatcgatatttcgatattagttccctttcagctagaacaaaaggctgtgcataaaaacattcaatcggatggtccaaatcacatgtataactaaaatccaatctatttagatcactaacaaaacgcccctcttttttatgtcgatttatgcaatcttcaattgttttctcgttattattcatataaagtattcttgcgccgattacatcagcgcctgtctcatattttgtagccaataaccgagatataacaccgggtaagaggtaagagtcatcatcaccaaaaaaaatatatttccctttggctatttcaatccctcggtttttagaatacatctgttttttattcgtttcattttctaaaataactaactgagaatatttttccttcagttcagctaatacactatttgtattatctgttgatccatcattgataactataacctctaaagtctcatcctgaaaataacttggtatgacctccttaagaatatgagccctgttataacttgggattattatgctgacatttttttctgacattttggtcaatcctttttatactggatgtataatgtaactaaaaaagcaacaaatatacttttgacaagataggggaagaaatagaacaaagtctctcttggtgtgaataatataggtggcaacacactataataaacaaaatatataattggtttgttttttgtatatttttccaatacatttaaattaagtaaaagtaaaaagggtataatgaaacatccaatcagaccaaatgctaaaaacgattctgctaaataactccccccaagtccgaacccaagattatatagttctgggtttgctgtgtatgaggccaaatggctatagcttatttccggcaagctcaatttaacattaaatatttacgagcaagttattattaactggctgaatagataggtaacattatatccccctgacaatagttgtagttttactgattgataaatggaaagatatgatactcccatgccgtatacaaagtttataacaggattattaccctgcattaattgaaaaaaactccctccagtgcgccacattgagataaattcactaatcacaaaaatgacgctaaaaacaaaaatcattgtaatcagcagacgtaagtttcttgtctttacttcattaaaatatatacatgtaaccgttaaaagaaacgttatagcttcactacgactacccttcaaggtgctaaatgcagcaatgcatatcgcaataaaaagaaattttttatttgttctgaactgtatatgaaacgcacatataaggaaaaaagaacaataaaataaataagatagaaaatcataacctattggcgttgttatatttgattgataaatatcaacataactattagattctataaagttaaaaaagaatatcccttttacaaccatacctatcgaacccagaaaaaataaagtcaaaagaaactttatttttagcaattgtttttcaggataaggaccatgcggataaaatttttcagtatttttgcatagaattagtcccaatgtataaccataatacattagtgttatagcatagttagccaaaatcacatcgtcatccatatatccttcaataaaccaatcggcaatcctataatcatagtttgcaaacaaagataataaagggcgacaacctaaaaacacaaaagatgatataacgagaaggctggccggagaagttattttattagtgatatatgcgatataaaaaactgttatcgttgctataacaaggatatattgtgatttatttggttcattaccaaacagtaacactaaaattgtcagcattaaacttaaatagaatgtaatagcaggaaccgccttcactttcattatactctcgctccccactttcgatgggcaataaaagctagcatactgaatacaagaaactcaccaattaggtttaataaaaccccccccagaatgtcaaagcgtgatattaacagccaggacaaactaacaacaataattcccgccataacatttatacttcgtagtatttttacattatctgtcggtataagaaactgtataccaaggacattatttaaagatgaaaaaatggtaattattgacgcaaataaaataataacaaatgaaacgtcaactttacctataaaagtcgccacatattgccctaatcccatataacataaacatgcaattatgctaattgttaaatgcacaaaaaaactttttttaattctataataaaacagtttatcttgaggtttaatttctgaaacttgagataacatatactgtgatattggattaattagactttgacatgctgttgtcattttttgaacgattgaaaaaacaccaagactcgtattaccgcaaaggtttccaattaacacaggaattagaccattgtaaccaatcgtacctattacgccaataaaaacatttcctgccttcttaaattccacaatgcattcattaggtttaagatgaacaacatggctaatatgaatatttggccataagtatatacagcatatgagtaatgttgcattttgcaaaaaacttaggataaaaacattatctccgccactacagacataaacaagaagtatgataaacaatgttattctcactattacttgtgagtatgaaagttttttaaaatcaccaatcccctgcaaaaaccaattgggcgataatatattaccaatagtgcatagaaaaattgacaaaaacccaaaaaatgacaagtggactatatttaatctgcacaataaaaatacacatgttaatgcaattataaaaagcaatgattttaaaagaacaactattgagtaatagcgctgtaaattttgggtctcacatctatgtctcgcagcaaccacaggtcctgtgtaagtaaagccaaaatcaataatcaaagccactatttgataaatagatgtaatatagaccaattccccatattcccccaacccaatatattttatcaggatagggataattaccaatggcgcgatataattaaataactgcaatatatacaaccctaaaaatacgttttttattttatctttaagccttaaataattgtgcacacgttgtatcctattcatttaggtgtaattatattattgaaatgcgatgttctataagaatgactttataatttcagcacgctaccgcccctggctttacagctaccagagcactgcatgcatgcctacgatgtagcgagcgttacccactcgcgctaaacccgaaaaattcaaacgctaattgtcttaccaatccgctctggaaacaaggaaaatcctggaaaactttgactaaaatcctattgctaactcgttgttattctgattgtttatataaaacaacggcaggaaaattcgcaacaaattactttcgccacgaatcttcactgccgttataattttcttatcaaccgttacattcggtcagattttcattattcgcttaacagcttctcaatccctttacggaacttcgccccttctttcaggttgcgtagtccatacttcacaaatgcctgcatataccccatttttttaccgcagtcgtagctgtcacctgtcatcagcatggcatcaacggactgttttttcgccagttcagcgatggcatcagtcagctgaatacgcccccatgcaccaggctgagtgcgttcaagttccggccaaatatctgcagaaagcacatagcgaccaacggccatgatgtctgagtccagcgtctgcggctgatccggtttttcgataaattcaacaatgcggctgactttaccttcgcgatccagcggttctttggtctgaatgacggagtattcagagaggtcacccggcatacgttttgccagcacctggctgcggcccgtttcgttgaagcgcgcaatcatggcagcaaggttgtaacgtagcgggtcggcgctggcatcgtcgatcacaacgtctggcagtaccacgacaaatgggttgtcaccaatggcaggtcgcgcacacaaaatggaatggcccaaacctaaaggttcgccctgacgcacgttcataattgtcacgcccggcgggcaaatggactgtacttccgccagcagttggcgcttcacgcgctgttcaaggagagattctaattcataagaggtgtcgaagtggttttcgaccgcgttcttggaagcgtgagttaccaggaggatttctttgatccctgcagccacaatctcgtcaacgatgtactgaatcattggcttgtcgacgatcggtagcatctctttgggaatcgccttagtggcaggcaacatatgcatcccaagacccgctacaggaataactgcttttaaattcgtcattatttcatccacctgtaaaatggttgctgaattatagcttgttcgatttttttcgccagcatcaattaccctgaattgattactgaattacttgtgatgttacgccgcttcgttgtggattgcagtagcattgttcctaagtatggctccatttttccaggaatggtcgcaaatctactccctccgttctggcaatctaaagttaatcttctccacattaacaatatggtgattaatcctgtcgatatcgacggagatttgtcctttttcattcaccgcatgaacatttgcaagagacagcagtgtttcttttttcgccataaacacgccgcgaacgtctttgcgcatgtcaaagttcatgctcaatgcgggtccaactgaggattcctgcatcacattgatatttcgcataaaaagatgttgcggtttgttgtgtaactccagcgacgcacgcttcatctcaatgttagtcagcgccacaaaggagacagcattcccggcggagatttggatgccgcgcaatttataagcaagatgagtattatccagttgaatatcattcactcggaaattctgcggtatcgagagatatttgcctttaattaccccatagccgattaacatcccggcactattaatcatttcaatattatcaatcacaaagttgtcacaaccataaatagcaactgtggcgttatcaatacctgctttcttactgaaatccggcgtgatattacgagctttgatattacggataacaaaatgtttaccattttcaacatggatcagttgccgacaatctgatcccgtgatattcgcaacgacaaagtttttcactgcctggttttccggataattattatcgtaagtacttcctgccagtcctatgccaataccccagttgattttgccgttagtacagttgatgcgctcgatgacatggtcggatatcaaaatgtcgcgatcgttgattgctacattccattcaatggcgtcgccctgtaagtcgctgaacttacaattggtgatgttggcaccgataatctggttatgaaatccctggcgtaaaatggcgtaattagcgtggctgacggtcaggttatcgatggtcaagttgcgcatgacgcgtttatttttgccgccgatataaatctgcgttaccgggccaaaaccgctcatcgccaaccctttgatgatgcagtcagaaccgcgcacatccagggtgatgttatgcatacggccgcccttctcccctgtcacctggctgccgtcttgtaagacaaaacgccctctgccgttgccgcgcaggcttccaaggatgtgcaacgttttgccaggaggaatgaagatgccggtgttgatattttcacaaacgaatccggcaggcacgacgaccgtttgcccttcgctgaaggcttgtttaaatgaggcgatccagtcgtgtgggttgtagtcgttaatgttaacgatttgtcgggcgggaagcgcgcgagcgaaaggggtatggaggaaggcaagcgccgagcttgccgtcaggaaggtgcgtcgggagagttttttaaatggcatacgttctcctctataaagcctgcagcaagctggcgagttctcgattgatcacctgctggttaaaatcgtgttcgactttttcgcgcgcacgtttgacaaccgtagtaagttcgtcggtgtccagttggctaaacgccgccagtcgttgcgccagtgcacaggcatcgttctcaggcaccagccaaccggatttatcggcctccaccagttccggtattccgctgtgcagagtagaaacaaccggaatgccaaccgccatcgcttccattagcgccaccggaataccttccatatcgccatccgcacctgtaaccgatggcaacaggaagacatccgcgtcatcgagcatcgctttcacttcatggctcggtttaaagcccggcatctctatcacatcttccagttgatattgttcgatgagggtgcgcaggcgtcgttcccacgggccaatgccgaggatgcgatagcgaaatgccacgccctgctctttcaactgacggcaggcttcaatcgccacatgcaggccttttttctcggttaagcgtgcgacggaaatgatttccagcggcgttgcaggtgctttcaccggacgcgggctaaagcgcgtcatgtccacgcccatgcgcgatacggcgattttttccctcgggcagcccattttttgcagccttccggcccacagatcgcttatcggtagcatcagatcgccacggcggaacagttgctgatattcgggagtgtagtggttgagcacttcccgcctggagatatcaataccgtggaagatagtggcaattttgccgcgaatgacacccagttcgcgtagttttgccgcggttaccccagcagggccaaaatgagcgataaacacatcggcatgaaacggtgttgcgacctgaccacaaatggcagacaaaatcaggttccgcgactcagcaccatagcgtttgaggttgagcgcctgccaggtatttttacgatgaatgccgcgtaaggtctggctggcgcggtggcgcagtttcgccactttgcccgcaggttcgtcctgtaaccagcgggttctggcagcaaggttgtatttcgtccatgccgcgtgggtgttttgtgtgtcgcctttttgcagcgcgacaatctccacctcaaatcccatatcaataaacgcggtaatttgattgaggacgaaggtttccgacgacagcggaaatttcagtaaaaagaagccgaccttcatttcacctccccgatgcgttcaagcacagattgcaccatctgcattcccgtctgacgttcgcgactgacagcttcgttaagtcgtgcgttcagcgccggaagctggcctaaggtatccgcaaccatcgcttgcaggctgccgtctaataaatgacggatatcaattgccatctctggtagccccagttgttgcataatcccagcggatttatgttcatagttgatggcaatcgccggggtggcaaagttcattgagataatggcggagtgcaggcgcgtaccgacggtgagttcacaggcccccagaattttgcccatttccagatcgttgagttcatccatcaccacgtggtaacgggcaggatcgctgatgtgctggcgcagattgagcgccaccatgcggtcgtctttgttatagctgtcgatgcccgtacaggtggagagcgcaatcacctgatagccttcgtcgagaatgcgattgaccaccccggcaaaggctttttcatacgcttgttgagtggtgccgaggcgtttgtcgaacggtgccagttcacgcagggtaatggccaccgctttctgttgtgcggcaacgtccagccagtgttgaacagcatagctggcggtgaagtcttctgtgtggtgatcgaccagccacgcggtatcgacgccatgttcaacttttgcggtagtgatattgctgcgtttcatcaaatcaaggctgaccgattcgcgcaggatcagcgcgtcgcagtgaccaaaaacgtagttcgccagttggttaaattgcttatcctggaacgggccgacgctgtgaccaatcataaacagcggctttttcgccatgaaagtgcaaagcgcatgttcaaactgcggcacgccgtagagatcgacaaaaaacgatccgccgacctgaataatggcgtcgtaacctgacagcagtcgcacgaagtcagtgaatccctgggcgatggcgatattacgcagcttgccagtgtcggtgacgcgtgagagcagtacctggtgctggtagcggtgacggaggacttttttaacgcgcccgacaacgcccgccgcgctgttgtgttttttcatttgcaggaacagcgggtcgcccattaccgggcggttgagcagccaggaagaactgaccggatagcggctcattacgtccacttcggcatgtggactgaggatattgatggcatcaagtaagccgcgcaagatggcgctgtcgccgcggttgccgcaagtgtggttgcccagaataagtaatttcattttttcctcataaatttgatgccaggtgaggctgtgtttgttgttttcgttgccgttttttgcctgatgcgacgctaacgcgtcttatcagacctacaagatccgagcacagaaccgtaggacggataaggcgttcacgccgcatccggcattcagtgcctgatgcgacgctgacgcgtcttatcaggcctacaagacccgagcacagagccgtaggacggataaggcgttttacgccgcatccggcattcagtgcctgatgcgacgctgacgcgtcttatcaggcctacaagatccgagcacagaaccgtaggacggataaggcgttcacgccgcatccggcattcagtgcctgatgcgacgctgacgcgtcttatcaggcctacaagacccgagcacagagccgtaggacggataaggcgttttacgccgcatccggcattcagtgcctgatgcgacgctgacgcgtcttatcaggcctacaagatccgagcacagaaccgtaggccggataaggcgttcacgccgcatccggcattcagtgcctgatgcgacgctggcgcgtcttatcaggcctacaagatccaagcccagccccccaggacggataaggcgttttacgccgcatccggcaaccgttgccggaaccgaaaacaaccattcaccccgcccgtaaaagcattttcattttttcgctgcgacaaaactgacgcttcacttccaccaccagcggatggcgcgacagcacaatcatcaccacaaacgccagcacgcccgcggctatttgcaccgccagcagcatccccagcgccagttgccctttcagcacaatgcccagcgcataactgaccaccagcgtcggcagcgagagataaaacggcagccacaaactcaggatgtactggcgataactggaaccgagcaccggtttaatcatcacgaaatagctcagaatggtgttgataatctgcaccagcaggaagccaagcgtgacgccgattgcgcccgccatctgcccaccaataacaatcgccggaataaacagaaaggttttgaatacgttgaatttaaagctgatatcgacccgcgctttcgccatcagcagcgaaccaatcgggttacccacggaacgcagcagccccaccacacacagcaattgcagcaccggaataatgctgttccacttctcaccaaagaccagcggtacaaagttattcgacaccaccatcagccccagcagcgccggaaagttgataatccccactaccgacagcagcttgtagaagttaacgcgcagcttttcggtgtcgtcctgaattttggcaaatgccggaaacaacacgcgggtgatgattgggttcagcttcatcggcggcacaacggccacgttgtacgccaggttgtatccccctgctacgcccgcgccgagaatacgcgccagcaccagcgttgaaaggttggtgttgagatagttgatgatgctgtccgccgtcagccaggcaccaaaacgtaagtttggtgccaccgacgccagcgagaaatgcagaccggggcgataaattttgcggccaaagtagccaaacagcagcgttctcaccgcactattgaccagataaccgagaatcgcggtcatcgccagcggccagaaatgggcgctaaccactgtaaaagtgaagcccgccagcaccgcgctggtttcgatcatgccgattttgttgaactccagctccttttgcatcaacgcgcggaactgttgcccgtgggggataaccacaaacgccagcgacaatgttttaatcaacggtgccaggtccgggttattcaacacgtcaccgatgagatcactcaacaaaaacaccgccacgcacaccacaagccccagcccaacgttcagccagtacagcgtggtgagttcaaggtggctgatttcttttcgctgaataatggagttagcgataccgaagtcagaaagcgtatctgccagcgcaatgatcaccagcgacacagtcagcaaaccgaactggtggttatctataatccgcgccagcacagtcatttgcaccagaccgaggccgatgatgatcaccgtggcaatcgccgaccacttcgcgccgctgatggttttttcacgtaagctcatatcaatatgccgctttgttaacgaaacctttgaataccgtcaggaaaacgattttgatatcgaaccagacgctccattcgcggatgtactcaaggtcgaactcgacgcgtttttccattttctccagcgtgtcggtttcgccgcgccagccgttaatctgcgcccagccggtaatgcccggtttcactttatggcgcagcatgtagccttcaatgagctggcgatactgttcgttatgcgccaccgcatgcggacgcggaccgacaatcgacatccccccggtcagcacattgataaactgcggcaattcatccagcgaggtgcggcgcagaaaattccccactttggtgacgcgcggatcgttctgcgtcgcctgggtcaccactttgtcgttctccatcactttcatggaacggaacttccacactttgatcggcttgccatccatgccgtagcgagtctggcggaaaataaccggtcccggtgagctcagtttcaccgccagcgcaatgcagcacagcaccggggagatcagcagcaggataagcgtcgccagcacaatgtcttctgcacgttttatcaggcggttaaccccggaaagcggcgtgtcatacagcggcaccaccggtacgccgttcatctcttcgagacgtgaatggagaatgttgaaggtaaagacatcggggatcagcagcaccgaacaggtggtgtccgccagttgatggaccagttttttcactcgcgcgccgtcgcacatctgcatcgcgatatagacgttatgaatcttgcccgctttcgcatcctcgaccagctgttgcagattacccgcccagtcgttagaaacgccacccggtttcgggtcgtggtaaacgcccaccacttcaaaccctaaccacggctgattacggaagctctccatcagcatttgtccggcggctaaatcccccgccaccgcgaccatgcgcttgttatagccatgattacgcagccagcccgccccaatacgaatacatgaacggcaaaccaccagtccgatgctggtcagcccataccacgccagccagattttcaattgcgtgtcgaaatcattgttgaacgccaccagtccggcgctgaaaatcacgcttaacgtccagttttgtagcaacagggcaaattctgtcgctgcccgaacaccgcgccatgagcgataaaaatcggtgatgccgcccagcatctggaacaccaccagcgtaatcagcgccaccaacaggtgcatgtagaggaatgacagtccgctcacttcgcaaaccagccatagcccggcaaacatgatggtgatatctgaaaagcgttgcaccatagagattaacgatgcattggttttcgctcgctcgcgcttttttagatttgtcatcgttgttcctgtttttagccccttacccgcagtgggggtaagggaagatccgacattactcgttcagcaacgtcagcagagttcgcgttcgcgcttccatcagcggcacatcaccgcgtgattccacattcaaccgcaccaccggttcggtgttggaggagcgcagattaaagcgccagtcggcaaaggtcatgctgatgccatcggtacgatccaccgccagtgcctcacggctaaaatgctgttccacgcggttaatcgcctcaacgggttgcgccagtttgctgttgatctcaccgcttgccgggaatgccgccatccggtcgcgcaccagttcgcccagcgtttttcctttcagacacaccagttcggcgaccagcagccacgggatcatgccgctgtcgcagtaagcgaaatcacggaagtaatggtgggcgctcatttcgccaccgtagatggcgtcttccttgcgcatacgttctttaataaaggcgtgtccggttttcgacattaccggggtgccgcctgcggcagtcaccacatcaacggtgttccaggagagacgtggatcgtggatgatcttcgcgccgggatttttttcgaggaacgcttctgccagcaaaccgacaatgtagtaaccctcgataaactgccctttttcgtcaaacaggaaacagcggtcaaaatcgccatcaaaagcaatgcccatatccgcgccgtgtttaatgaccgcattgcgggtgtcgtcgcgacattccggcagtagcgggttaggaataccgttggggaaattgccgtccggcgtgttatgcactttgattaactccaccggtgcgccgagggctttaaagcgggcttcaatggcgtccaccaccggacccgccgcgccgttcccggagttaatcaccagcttgagcggcgtgaggtttttgacgttgatataaccgaacaggtgatcaacgtaagcgtcacgcagattgatttgctgatagcgaccgcgtttggtttcatcgacgggaggaaagtcgttggcttctgccagacgctggacgtcgcgcagtccggtatcgccgctgatcgggcgagccccttcgcgcaccagtttcatgccgttgtaatccatcgggttatggctggcggtaacttcaatgccgccatccacaccgagatggaacgtggcgaaatagatttcttcggtgccggacataccaatatccagcacgtcgacgcccgcatcctgtaaacctttcgccagcgccagttttaaggtttcgctggtgaggcggacatcaccgcctaacacaatggttttcggtttgagaaattcgccataggcgcgaccaatgcgccaggcgatatcttcattcagttcttcgcctaatttcccgcgaatatcataggctttaaagcaggttaactttttcatatcgttaccctttttcaggcaatagttggccctgaccgaaacggccaattttgtttttgtcgttatttacatcgcggtttcgcattcattgcctgatgcgacgctgccgcgtcttatcaggcctacaaacccgaaccgtaggtcggataaggcgttcacgccgcatccgacaaacagcgcctgatgcgacgtttacacccgtccgtagcgatccgcgaagcgcaccacatcatcctcttcgagataagagccggagcgcacttcaattaaatcgagcggaattttccccgggttttccaggcaatgcgtcgcccccagcggaatataaatggactcgttttcaccaagcagtttgatatcaccgtcgatagtgacttttgccgttcccgcgacaaccacccagtgttccgcgcggtgatgatgcatctgtaccgacaaaccttcgcccggtttcacggtgatgcgtttcacctggtagcggtcgcccgcgtcgatagagtcatatttgccccacggacgatacacttcgcgatgcacccgatgctcatggcgaccatcggctttgatctgctcgaccacttttttcacatcctgcaccgcattacggtcggcaatcagcactgcatctttggtctgcactaccaccaaatctttcaccccgacggtggtgaccaggccagattcggcatacacatagctgttttcagttttgtgattaatcacatcgccatggcaaacgttgccctcggcggtgtgggcgctgatctcccataatgaagaccaggaaccgacatcgctccagcccgcatccatcggcaccacaacggcatctgccgtgcgttccatgaccgcgtaatccaccgactcttccggacaggcgagaaacgcctcttcatccacacgaataaaatcgagatccggatcgacggcgctcatcgctttttcgcaggcatcgagaatatccgggcgatattttttcagttcttcgagatagcgtccggcacggaacaggaacatgccgctgttccagtaatattcgccgcttgccacataggcctgagcggtttccagattcggtttttcgacaaactgcgccacttcaaaggccaccgtatcctgctcacccgcagacacttcaccgcgacgaatatagccatatccggtttcaggtagatccggcacaatgccgaaggtcaccagcttgcccgcttcagcatacggcatggcgttacgcacggcggcgcggaacgcatcttcgtcggcaatcacatgatccgccgccagcaccagcattaatgggtcgttctccgggctatgacgttttgccgccagcgccgccagcgcaatggcaggtgcggtgttacgccctgccggttcgagaataatgttctcggtgagtttgttcagttgacgcagctgttccgcgacaataaagcggtgctgctcattgcaaatcaccaccgggctttcgcactccacgccgttcaggcggcagatggtggtttgcagcatggtgagatcgcctttcaggcataaaaactgcttggggtaaagtacgcgggaaagcggccataagcggctaccggagccacctgccatcacaactggatagagtttcgactgcgccataattatccccgaatatcatttataaattgacgtaacacgttctctttatcgagcgtgcgttcggcatattcacgtgccaccgtgttgtgtttgggcagcaggaacgcctgacgaatccccgccaccagcgcctcgaccgattccggttccacgcaaaccgcaatgcccggaaaggtttcgcaaagctgccccagttctgtgtgggcttctgcggtaatcaccgcgttaccgcctaccgccagaatattggtcagtttcgacggcaatacggcatctgccgcgccgcgtttttgcaccaccagatggcaatcccccatcttcagcaatgcgggtaaagcgtcatacgattgcagcggaaaaaattgcatgttgcgcagtccacgctgctgcgccattttttccagccgcgctttgccgccgccctgcccgacaatggcaaaaataagcggttcatcgcgcaggcgatcggcagcttcaataacgttttccagcccctgcttttcaccaatattgccggagtaaagaatgatttttttgttatccggcaggccaagctggttacgaagggcatcaacatcggcgtctgcgacatgctgaaaacgggcaatttctgaccagttggggaagaagatgacgttttccgccgccacgcctttttcgatagctttattcatcattgagcgcgaaatcgtggagacgttatcgacgttatgcagtccgctacgttcgaacgccgttgccagctgtgccactttgccgcctttgccttttccggcaaggcccagccccagcatggcgtccacttcgtaatcctgaatatggagcaccgtgcgcgcaccagacagtttcgccagcagccgcattcccggcgtgcaaaacagcgttggcaccacgccgataatgcgatccggcttccagcgacgttgcgccatcagtggaaagaaactgctgacggcaaaactgccgagatgcaacaggcgtttcagggtgctcggctgttttggcacgtacagcgggcagcgccacaccgtggcggccccctcttcccgtttgtaccgccaggcggaatagttctcgcccacctgccactgcgggtagtaaggcggcgcggtaataacccgcacctcatgaccttgtgctgccaaccattccaccatctcgccggtgtacttgccgatgccggttaactccggcgagtagttaatgccgtagaccagtattttcataatccgggtactccggcacgcttctcagagagaaaataggcgcggctgttagcgtgaacattgtcactggcgagcaacgcgtccggcgtcagccagcggtaatcgtcatgctgctcatccggcagtaacagctcatcttccgctactctgaagcgaaaaccgagcaccacatagtgagtggtgaattccgtgccggagaagttatcgtcataaaagtgctgccagacaccgtaaaactggcctactgttatcggtagacgcagccccagttccgccatcgtcagccgctcaaatgcggcttccagcgtttcgtctttctgcacgcgccctcccggcacaaaccagtaaccctgcgccgggcggttggttcttttgccaagcagaaactcgccgcgactgttctcgacaataaagtcgagagagacaagcggtgtggagcgcactaccgtggcaaagtcttcctgacgtaaaaacatcattacccccgaaagcggtcttgattctcaaggaaccactggtaagtgctggcaagccccgcttccagtgagatttcgtgataccagccaagctgatgcaggcgcgtcacatccagcagtttgcgcggtgtgccatccggtttactggcatcaaaaaccacccgacctttgtaacccaccactttggcgatggtttgcgccagctcgcggatagtgcagtcaacgcccgtgccgacgttaatgtgcgacagcatcggccgggtgttctcctgccagacttcgtgcgccagctccatcacatgaatgctcgccgctgccatatcatcaacgtgtagaaattcgcgcatcggcgtaccgctgccccacaccaccacgtccggcgcattctgtgccgtcgcctcatggaagcgacgcagcaatgctgggatcacatgcgaattactcgggtggaagttgtcgtgtggcccgtacaggttggttggcatgactgagcggtaatcccgtccgtactggcggttgtaagattcacacagtttgatcccggcgattttggcaatggcataaggctcgttggtcggctccagcgtaccctgcaacaactcgctttctgccatcggctgttttgccagtttcgggtagatacaggacgatccgagaaacagcagtttgttcacgtcgttctgatgcgcggcgtgaatgatgttgctctcaatcatcatgttctggtagatgaaatccgccggataggtgttgttggcaacaatgccgcccactttcgccgccgccagatagacctggtcaatacgttcgctggcaaagaaatcatgcaccgcgcggctgtccagcaggttcagttcatcgcgggtgcgtaataccagctccacatcaccgcgctgttcgagctgtcgcctgatggcggaaccgaccattccgcgatggccagcgataaaaatgcgttgtttactcatgcttatgactccagcgcgatcgccacgtcgtagccgtgagatttcagcagagagtgttttttcgccgcttcgaggtcattagccaccatttcagacaccatctctctgagggtgatttccggtttccagcccagtttttcgtgcgctttggtcgggtcgccgagcagcgtttcaacttccgccggacggaagtaacgcgggtcaacggcgataatcacatcgcccggtttaacgcccggcgcgtcatgcccggtgacggaaaccacaatgcccttctcttcaacacccgtgccttcaaagcgcagtttgatgcccaactgtgctgccgccatttccacgaactgacgtacggagtactgaacgccggtcgcgataacgaaatcttccggttgttcctgttgcagcatcatccactgcatttttacgtagtctttggcatggccccagtcacgcagggaatccatattgccgagatacaggcacgactccagcctctgggcgatgttggcgattgcgcgggtgattttgcgggtaacgaaagtctcgccacggcgcggggattcatggttaaagagaatgccgttacaggcgtacatgccgtaggattcgcggtagttaacggtgatccagtaggcgtacagtttggcaaccgcatacggagatcgcgggtagaacggcgtggtctctttctgcggaatttcctgcaccagaccgtacagttcagaagtagaagcctgatagaaacgggttttcttttccagaccgaggaagcggatcgcctcgagcaggcgcagcgtacccatcgcatcgacgtctgcggtatattccggtgactcaaaagaaaccgcaacgtggctcattgcgcccaggttgtacacttcatccggctgcacttcacgcaaaatgcgcgtcaggttggaggtatcactcaggtcgccataatgcagatggaatttcgggttgcaggtgtgcggatcctgataaatgtgatccacgcgctcggtgttgaatgacgatgcacgacgcttaataccatgcacctcgtaacctttttccagcagaaactctgccaggtaagaaccgtcttgtccggttacaccggtgatgagagcgacttttgacatgtcttattcctctgtattttttgaatttattcagtttcaacgcgtttgcgtatcaccactgcggggttcccccggcaaaccacatttgccggaagcgatttaaaaacactgcttcgcgcacccacgacggtgccgtcgccgatcgtgacgccaggggcaacaaagacatcggttgccagccagcatttctcgccaatcacaataggcgtggcgttaatggtgaaatgttgacttgcatggtcgtggctcccggtgcataaataacttttttgcgatatcaccgaatgtgcgccaatggttatttcaccgagggtatataaattgacctcatcgccgacccatgcgtaatcacctaaggttaatttccacggataggtaatttttactgacggacgaataactacgttttttcctatttttgcgccgaataaacgtaataaaaatgcccgccagcgatacaatacttgtggcgaccaggcaaatattgttgcctgtactgcccaccacaattgcactttaatagcgttgccaccccggaaccctttcggcaccgagaatccacttaaatcctgcatcgttttcccttatattcagcttttgttatataaggctttcgtctttgaggtcgtatgttggcgtaaatgccaggataattcagcccaaaagccaggcacgtgcaatatctgccgttggacttttttggcgtcagcacacaattccatattattggtggtagataccccacccatagaaaattcagacaccaggccattgagttttttaaatgcataaccggctttatacattttggccgccagcgcgtaatcggaagaaactttatattccaggtcataacgccatttcttcaagccggacaccgggaaaaatatcgcctgatgactggcgggcaggctgtggtaaatataccaacccggtttggcgctacgtttaattttatgcccatcgccaaaatccagcagcgcatcgccggtgatcatcatgttatctttttgcacttttaacttacggacaaaatttgcggcatcctgatgaaaaatatcgcctgaattgagaaacagcgcgaacttgccttgcgccatttcaatacctttgttcatggcgtcgtagataccgttatctggttcgctgacaaagcgtaggttatagataccattgagattttccagatactcacgggtgccgtcgttggaaccgccatcaacaacaatccattcgaagctgataacgtccgcctgcgccagatgcgccagcgaggcatgtgttttgactatccctgcgaggttacgaaacgcgacagtgattatgctaagcaacatgttcttattcttacctcgtaatatttaacgcttttcgcaaaataaacggacagacgattaaaaatgcatattccgggctaaatatcgaaccggtaaaaaacagcgataccggagtaaaaagatataattgcacgcgaaaattgcggttatcaccaaaagcgttgatcatcatttttatcactttccccatgtaccacagtgataaaagcaccgcgaaccaggaaaaataaataatcagcagatacaaaccattgtctatggtttttccgacatccgcaccgttaaatattccgaatgatgcgacatattcataaagtgagccaaatctgactacaccgtcaatatgggtcaaagaataaccgaccatcaccagcggaccgacaatacgataatatgatgacgatccttccgtacctaaatcgcccagacgggtggaaatataaggaaatgcaattaccacaccaaccaggaatacagccatagaaatcaatgctaacggtaactttttcttaatcgcctctttattcagatattgaaatgcccactccagcaaataaaacaggataaaggtcataacccctgaaaacgatccggataatattatccctgcgagaatcatagcatcggttttaggcgttttaataccaaactgtttgatgctgagccaaattgagattaatgccagagcgaaaaatgccggttcgaaataaagtgctgtcgtgcgcttgccgccgaatttgatgaaattcagcacatagctgttgctgtaaatcagatatttcgaaatcgactccataatactgctgccaccggtgaggataatttgcgccatctccaccgccgccagcgccaccaccaacccgaccaccagataaaaaaagcgtaatatcttgcggtggttgtggggcgaaatcgttttaaagcgaatactccacaccatgccaataatgatcacaatatagacaaacagcatggttgaagtgacgtatttaccggcatccaacgactgaccaaacaggtagttaaacgccgtgagccccgcgccaatccctaaggcaatcatcaattttttaacgctgatgcgctctaaaaacagcagtaacaagacaggtaaaaaagtgacgatggtgatggggaaactttcgccaagctgggcgattttgacgttaaccagcaggtagatcagcggcagcagcaggtagctacagattctgatagaagttgacatactcctccagcatctgttgtccactgtaggcggcgcggctgcgctggctgaactcagccagcgtggtaccaaatatcgcctgtgcgatttccggtttgcttaactgcaccagttgcagcacctcttcttcgctgacggttttaccgccggatttttgcagcacttcccgcgccgcgtcgctatgggtggcaatcaccggcacgccaatcgataacgcctcacacaaaatcagcgggtagttatcgacgcgagaactgaacaccagcgcatccatctggttgagcgcgctcatcaacttgcgcttgtcagtttcaaagccgtgattaacaacgttaccagcggtgaacggcgagaacttaccgaaagtatgcagttcgattttgtcgctcagcgccatcatctcgcgcaccagttgctgcttagttttgccgtcgtaacgcagatcatgcgccaccactgcgattttcggcttgccctgggtttcgcgtaccggaggcaagtccgccagaatcgcttcggttgccatatcaatgccattattgataatccggcaacgccctggaccgtacagactattgaaagcatcagccacatgctggctgggggaaataaactgacagcccagtgccagcatctcgcggaataactggcgtttacccgccaccagctggtgcgcgcgatcaatcttcaccggtggatagttatttaaggtcgggcatttctggcagcccgttttccagccttcgcaaccgtcggtaaaggcgcagcgtccggtaacgctccaatggtcgtgtagcgtccagaccagagtgacatccggtttatggtttttcactttttcgcaaaagcgcaccacgctcttaagattcaaccagtagctgtgcagcacatgaaaatgcagaaccaccgggcccggtgtgcgagtaatggtgcgatataactcattgaaattgccgaacagatcgcgattaagcagacgaaacaacgcaatgttcgccatcgcggtcatccgtggcgtatgtttgatgacctgcggatagttctgatggctgacgctctctttgccgcctttgccgtagccgtagacaaaatgtgacgccagcccctgttgcagcgcgcgctggtggagatctaacgccacacctgctgccccgccttccgccagtcgcacattaaattgcagaatattcatttaattaccttcactcgcgctttttctcccaccaccagcgcgttgtccgggacagagtcgagcaccacgctgcccgcgcccacggtgacgttgttaccaatcgtgatatcaccaagaataatgacgttggcaccgagttcgacgccgttgccaatgtgtggacatgccatgttatcggcaccacgattgccgatagtgacgccgtgacgaatggtgaaatcatcccccgcgaccacgtttttattgatcactacggcgtaaccgtgatggatagtaaagcgtcggcctatggtcgcggcggcctggatttcataaccgaaaaagcattcggtgataatgcgatacagcaccagcagcggggccgcccaaagattgttgaggacgttctttttgcgccacaccgaacaaaaatgagcggcacgataggcaagaaccatgcagcacgggcgtaaactccagctgttggcgcgcagatcttccagcatctttagcgcccccgaataccatcagccagacgtttgccgttacgcaccgacagcagcgtcagcaaagtgcgccaggtcatgcgtttattgcggatctggtagagggtaaacagctgatattttttgctggcgcggtcgaatttgtctttgtgcttgcggtaaaagtggaagtatccggagaattttttcggtgacgaggtgatctgcatttcgccgtgattgatatgcaggatctgcgtcgcctcttccactttccacggttcgccgtactccaccaccatccgcaggaagatgtcgtaatcctgtgccgctttcagttcggtatcgaacaagcactctttgaaacgccacgcccaggtaaagacctgattgccaatgatattgcgtttgtaaaacaggcggcgtgaatacggcgatttgggatacagcggcaagcttgccggttgggaataaacttcgccctggcaaacgtagtcgttagcgtacaaaaaggcgtgagtgaccagttgctgtttatgggcgaggaagacgctcaggcggttgggtgtccattcatcgtcgtcatcgatcccggtgatgtattccccttgcgccagcataatcgcctggttacgtaccgcgcacgccccgctgttaatgtcgttgtgaatgtaagtgatgcgcggatcgttgagggcggtgacgtactgttgtagttgttcccaggaggtggagcaatcatccacgataatcatctcccagttgttgtagtcctggcgcaggaccgattttatcgcccgaatcgccagttgttggcggttccaggtcggcatatagattgaaatcagcggattgtctttcataggttgttctcccggcttatgagctggtttgcttgccggatgcggcgtgaacgccttatccggcctacggggcggtgcgaatgcaagcgtcgttatttcgcatccgacttatattcgtattcgtaatagccataatcctgatacgcgctggcgcggcggaagatggagttcagaatcacccctttcaccggaataccgttttgctcaaagcggctcagactggtttccacttctttcaatgtgttgaccgcataacgcgccaccattaacgtggttccgacatgacgaccaacaattgccgcatcggtcactgccagaatcggcggcgtatcaatcaacaccaggtcgtagtttttactcgcccagttcaccagttcggcaaagcgttcgctcatcaacagttcagaaggatttggcggtacctgaccgcgcgggatcaggtcaaatttggcaatagaggtcggtttagccgcggtagtaatatcgccctgtccaatcagaatttccgacaggccattaacgttattagtgcccaacagctcgtgggtgtaacctttgcgcatatcgcagtcgatcaacaacacccgtttattggtctggctaatcaccgccgccaggttggcgcagacaaaggttttaccgattgacgggctaaccccggtcatcatcaacacattgttctgtgcctgcatcatcgcgaagtgcaaactggtacgcagactgcggatggcttcaatcgccagatcggttggattccccaccgccagtagctggctctgtttatagcgtttaatccctttgatggttttgacgctatcgcgcgctttctgccactccgacagcgggatgctggcatagacactgataccgtgttcttccagcacctgcgggctttcgatgccgcgattaaacaacgagcgcagcagcacacccacgatagagagcatcaggccaaggataatcgccccgaggataatcagccctttcttcggttttagcacgccaggctgggtgattgccgggtcaacaatgcgcacatcgccgacggtgctggcttcggtgattttcagctcctgttctttattcagcagttgcatatagacctgctgcccagactcgacatcgcgggtcagacggacaatttcctgctgggttttcggcatcgccgttacgcgaccattaagtttggctttttcgtcttccagcgcctgccgtttctccagcagcgtgcggtacgccggatgaactttggtgtacagcttggagatttccgcctctttaaaggtcagttcgttcaactgcgcgtcgatgttcaccatcgaatcgagcaccgctttcgcttccagcggcagatcaacagaatctttatcctgacggaaggcattcagtttgttttcggcaacatcaaggcggctacgtacttccggtaactgttgcgcgaggaaggcgaggcttttcgacgcttccgccgatttgcgctcaatattttgctcctgatagttacgggcgatgctgttaagaatgtcgcggatctgttcgcgatcttcaccggtataagtcaagctcagtacgcctgcgtctttgccgttctccgttaccgtcaggctgttttgcagttggttgatcatccccagcgtggagtatttggtgacggtaaactcactccccgggctggcgtgaatagcttcaaccatcagcgtgacgccttcttttttcagcatctggcccgcttgcccacgggcgctaaagccgccatcactgctcagggtgtagtttttgtcatcaagcacattaagcgtaaacacccgatccgccatctctttcgggcggttaaaggtggtcactttcaccgtctcgttctgacgtcccatcaggcgatcccagcccgcaccgaaaatcgggaacgtgtttttgctcaccgcaatatcgaggtcgagatcgtccaccgttttaccaagcaccagacgcgaacgaatcaactggatctcggcgtccgatgctggcggtttgttggctaatgccgaaccaatgtcctgcactaacgaattgccactgttttgctcgatttgtaccagtgcgtcggcactataaatcggcgtggcgaagaaagtgtaaaccacggaacagagggcaaatacagcggtgatgccaatcacccaccagcgcgcttcaatgacggtgccgaccaggcgaccaatatcgatttcatcactgcccgttaccggagcggcatgttgttttactttttctgtcattcttatacctgctctgcgttcaatgcctgcgcccactggcgggcagaccgttcaagtaatgtgtacaccgctgcaaacgtttcccggcttttgcgatacggatcggggatttcacattcgttatcccagtgaccaaacagcatcactttgccgcgcatctcaggtgccatctcgcataagcgttcgatatggcgcttttccatggtcaaaatcaggtcgtagttgcgacacaggcgacggctgatttgccgtgcacagtgaccttccagagacagttgatgttctgcggcgacgctgatagcagtagggtcagcgcccttaccgaccagcgcgccgagtccagcggactccactttcagctccgggtgataacgttgcagtaagcgttccgccgtcggggaacggcaaatattgccgacacagacaactaaaatgttgttaaacatgacgattaccagttatgaatgtcgctggctgtatccgtcatgtaacggacaccgctaatagttggcagcaactgattgatcagacggttccagcgggataccggggcggtggtgacatacaccacgtcataaggttgcaggcggaattctgtcgccattaccagcgacgtcgcatcggacatatccagctggtagatattggcaatcttgccgttacgcccgctctcgcctttcagcggacgaatgacaaagatgccgctggcgttggaggtggtcatgtcgatgccttcagcattgcccagggcttcagtcagggtcatgccgctaaagtccattttcagggtgctctgtttcttcacttcacccatcacaaacactttcagatcatcattacgtggcacgtaaagaatatcgccggggtaaagcagtcggttctgattgaggtcgccgttttgcatcagcgcctgcaaagaaatgcgctcttcacgaccattgtgtgttagcaccacgttgcgccagtcagcggtgtcggtcaggccacctgcggcgttgatagcgtcgagaatggtcagaggcacgttggtaatcgcctgttgaccggatttattcacctgaccggagatataggctttttgcgagcggaaggcggcgatattaacgtccacctgcgggtcagagatgtacgtcgctaagcgcccggtaatatcactgcggatttcagcgagcgttttccccacgacgtgaaccttgccgatatacgggtagaacatggtgccgtcaggctgtacccagttgccggtgtcgctggagctgcggtactgaccggctggcgtggtgagttccgggtgatcccagacggtgacattaagaacgtcccccggcccgacgcgatactggtaattcgcgatctcactttccagcgtcatattggggcgcgctacgttgggtcgtgggcgtaattgatcaatcaggcgcggggttaacggataaacattcaccattttgtcgaggtcgaaatcagcgtcctgctgtttgatgacgtctttccccatcgtcgacatattgctgcccggaagtactgtgcaaccgcttatcaaggttactgacaccaataatggcatcaatttcattttggatttcatcattgtttatttatcactttggcagagtaattatcctgtgcactattaatagcaatgtcgccatgcacatttaccttgcagttaattgaataaaaatttaactggcatcagtcctaaaaaaattgatttcatccgcaggctattgacagaataattcagactggtctttcaggcatccagacacgctaccgcccctggctttttagctaccaatacactgatttagtttaatttttcaaaccctctctgcatacagtcgttgatgagaaagggttattgcggaaattaatttccgaatataaggtgacattatggtaattgaatattggctctccaataatgcaggaggaagtgttacagctaacggaatagcaggcaaggtaacaattcggcaattggctatttttaagaattatattaagtgtcattcaatatggtttttaggagtttctttaggttgacaatatttaatatggcgtctccacatgcgatatttcttaaataacactttattattaccacttataattcggggataatgtgaagttataaccctcaaataatatgagataaatagtgctgcaacattgcatttttgccccgatttatccatgatcgaattgtgacatttgtcatacaacgaataggttttgtacttactatggaatggattgccgatccgtctatctgggctggattaatcacgctgattgtgatcgaactggtcctcggcattgataacctggtctttattgccatcctcgccgaaaaactaccgcctaagcagcgcgaccgcgcacgggttaccgggctcctgctggcgatgttaatgcgcctgttactgctggcgtcaatctcctggctggtcaccctgactcaaccgctgttcagcttccgctcgtttacctttagcgcccgcgacttaatcatgctgtttggtggtttcttcctgttgttcaaagccacgatggagttgaacgaacggctggaagggaaagacagcaataaccccacacaacgcaaaggtgcgaagttctggggggtggtgacacaaattgtggtgctggacgccatcttctcactcgactcggtgattaccgccgtcgggatggtcgaccatttactggtcatgatggccgccgtcgttatcgctattagcctgatgttgatggccagcaagccgttaacccagtttgttaacagtcacccgacgatcgttattctctgcttaagcttcctgttgatgattggctttagcctggtggcggaaggtttcggcttcgtcattccgaaaggctacctgtacgctgccattggtttctcggtgatgatcgaggcgctcaatcagttggctatctttaaccggcgacgttttctttccgctaaccagacactgcgccagcggactaccgaagcggtaatgcgcctgcttagcgggcaaaaagaagatgcggaactggacgccgaaaccgcgtctatgctggtggatcatggtaaccagcaaatctttaatccgcaggaacggcggatgattgagcgggtacttaatcttaaccagcgtaccgtcagcagcattatgacgtcgcgccacgatattgagcatatcgatctcaacgcgccggaagatgagatccgccagttactggagcgaaatcagcatacgcggcttgtcgttactgatggcgatgacgcagaagatttgctcggtgttgttcacgttatcgacctgttacaacagtcactgcgcggcgaaccgctcaacctgcgggtgttgattcgccagccgctggtgttcccggaaaccttgccgttgttacctgccctggagcagttccgtaatgcccgcacacactttgcttttgtggtggatgagtttggctcggtggaagggattgtgacattaagtgacgtcactgaaaccattgccggtaacttaccgaacgaagtggaagagatcgacgcccgccatgatattcagaagaatgcggacggttcctggacggcgaatggtcatatgccgctggaagatctggtgcaatatgtgccgttgccgctggatgaaaaacgtgaatatcacaccattgccgggctattgatggaatatttgcaacgtattccaaaacctggcgaagaagttcaggtggggaattatttgcttaaaacgttgcaggtggaaagccatcgcgtgcagaaggtacagattattccgctgcataaggatggcgagatggagtacgaggtgtgatggcatgtaggcctgatgcgacgctttacgcgtcttatcaggcctacaggacagctcaccaggtaacctacatcttctccagcaacttcttcacatctttgccattgcgggaatctttattccgctcggcccagtcgttaagacggcgttttgcttcatcctgtagatgtttacgcagtaactgatccacttgcaggctgtaattaagttgctgccagttgccataaacccgcagcggtactggcgtttctttgaggaaatcaatcagtttgctttctccgttccagccacccacgacccgaatatcaaactgggtgtcgcaggtttgctccgccagattcaacgtaccagccccggaaagcgccagcatgggcgattgaccttgcatgtcgtttaacgtcacgacgccatccttcaacgtcaaatcggtggtaaagcggtcaagacgcgtcacgttatcgaagttttcagcggccttcacatcaccaccattacgttctaccgcttgctgaatcatctgctggaagttcatcccttccatgcgtgtgtcggtcatttcgacatgtgcctgtccttgccagttgtggcggaatgcgtcggcatctatgtcagcaccggagaaatcaccagccagtgacatctttccggtcaacgaaatcggatagttaaacgccttcagaatggtgccaatctcaacgttttccagccgtggctggaagtttatccgcggatttattgatgtcgcgtccaacgtgcccggcagtgaaacctgtccaccgttaagtttgccctgcagttgagtaatttccagcaaacccgacttgttggtcatttgcgtggcaacatctgtaaaattcattccgcgccagcgcacgttactggcctgcaacaaaatatcagccgtaaagccttgcagtccctgataggccggttcatcaatacgcgaagaaatgaccgggcgcggcaacgttgattggctctgcccttgctgcgcggcaccgttctcaccgttcgctgtttcattaagggggatgaggttgtcaagattcagttgcgggaattgcagtctcagctgccattccggtttctctgtcaacgtgacctgtgcttgcccgctcagcgtactgtcattggcggtcaaactaatttggttaaatgaaaggcgtttatgtgactcctgccactggacctggaaactcccctgcccctgaataccttgttttggtaaatcggcaccctgcaactgccagttaatttgttcaatagccgccgttaaatcatgcggataatcagaagcatccaccgtaccgttaagggataatgtgagatcgcgctgatcgcgattaacccgcccggaaaactcaaatgagccacgatgttggggatcttgttccatttgcaggcggatattgcggattgtcacctgctcgtcatcttcatgctggaacaccagaacgctgtccgccaccttaagactggatatatcaaacgaccatccgcgatcgtctgacagatccggcaaggtattgtcgcgcggtgcaaccggagcgtcttcactgcgcactgcttccgtctgcggcgtcagttggatcactgccccttttagcatcacctgcttaacgctcagttgatgactcagtagtggtaaaagcgccacgtccagacgcatgttgtcggcgcgaaccagtggctggcttgcgccctgggcggtgagagacattcgcccggagaggatactaagctgcggccagacgtgccaacgcagtggcccgtcgagctgcaattgataaccgctacgtgcagcaacttgcttgaccatatagtcgcggaaatcattcggattcaccagcaacactaacgcagataacccggccaccagcacgaccaggagtatcatcagcgtcgtcagaaatcgtctcatggtatcctcaatgggcctgaattagtctttatcgattcggctggctaccgcgccctgctggttgcgatatttcgcatcttcacggcggttgtaaggtcgcgccgccgggccggagagcggctcaaagctcagcgcaccaattaacatgcccggacgcagcgccagcggcagcttaccggagttgtaaaactccagcacaatgcagccagaccagcccggatcgatacggtgcgcggtgacgtgcaccatcagccccagacgcgccagtgaagaacgcccgtccagccagcccaccagatcggctggcagcgtcaccgactccagcgtcaccgccagcgccagctctcctgggtgaagatagaacgcctcgctttcatcgagaacgatctcatcgctcatcacgcggtcaagcgcggcgctcacttcatctttgggaccgctcagatcgataaacgctgccgtgtgaccacggaaggtacgaaatttattgcccaggcgcacatccaccgtcgcgccgttaatacgctccactggcggacgtgggttgatcgacaaacggccttcatcaagccaggcttcaatatctcggtcacacagacgcatggcattttctcctttcgagcatcactcccttaacgccaattacgtcaagggcataccaggttatcactgaacggtacacaatttatcaagcttattcaaagaactgacttattttcgctttcaatatatcgatcgcgatgcggtttttcccgccgcgcggcacgataatgtccgcatattgtttagaaggctcaatgaattgcagaaacatcgggcgcacggttttttgatattgcgccatcactgaatccattgaacgcccacgctcgttaacgtcacgcttgatgcggcgcatcaggcagatatccagcggggtatcaacgaaaatggagaagttaagttcgtcacgtaaacgcgcatccgtcagcaacaaaatgccttcgagaatgatgaccttcttcggctcaaccgtcaccgtttctttcatacgcgtatgttcaacatagctgtaaaccggcaggtcaattgccgagccgcgtttcaacgcttgtaaatgctcaagcagcaggctgtgatccatcgcgctgggatggtcgtagttggtcttaacgcgttcttccatcgacagatggctttgatctttgtaatagcagtcttcgggaattacgccgatgtgttcatcaccgacttgctcacgtaattcacgataaagggtactggcaataagactcttgccggaagccgatgcgccagcgataccgataatgacgcactgatgagactgatcagtcatatatttagcgacctgattaacctggatgttaggaagggggcgacgaagcgccaaacgcggcaattatagggatttcatccgcctgataccagtcgaatagcgttgccgcgcgctcagagttaattgttgacgaagaattcccggtggcaaattacgttgatcagttttatacaaggtaaaaaatgttatacgcagttgcgcaaattatccgcctttacgtcactttatgagcaattcgcatataaaatgtaaaacttttgtactagcataaacacagaaacgaatactggcgacctggccttgcggataaagcggtaatgagcaaacaatcacagcatgtattaattgccctgccccacccgctgcttcacctggtcagtttaggtttagtctcgtttatcttcacccttttctcacttgagctttcgcagtttggcacccaactcgccccactgtggttcccgacctccatcatgatggtggcgttttatcgccatgccgggcgcatgtggccgggaattgcgctgagctgctcgctgggaaatatcgccgcatccatcctgcttttttccaccagctcgctgaacatgacctggacgaccatcaatattgttgaagccgtggtcggggcagtgctgctacgtaaattgctgccgtggtataaccccttgcaaaatctggctgactggctgcgtctggcactcggcagcgccattattccgcctctgttggggggtgttctggttgtcctgctgacgcccggagacgatcctctcagggcatttttgatatgggtactgtcagaatccatcggcgctctggcactggtgccgctgggattgttatttaaaccacactatctgctgcgccatcgcaacccaaggttgctttttgagtcgctgctcacgttagccatcacgctgacgttaagctggctttcgatgctgtatctgccgtggccttttactttcattattgtgctgttgatgtggagcgccgtgcgcctgccacgaatggaagcctttttgatcttccttaccacggtgatgatggtgtcgctgatgatggccgcggatccctccctgcttgctacgccgcgtacgtacctgatgagccatatgccgtggctaccgtttttgctgatcctgctgcccgccaacatcatgacgatggtgatgtatgcctttcgtgcggaacgcaaacacatttccgaaagcgaaacccgctttcggaacgcgatggaatattccgctatcggcatggcgttagtgggcaccgagggacaatggctgcaatccaacaaagcgctctgccagtttctcggttacagtcaggaagagctgcgcggactcacctttcagcaactgacctggccggaggatctcaataaagatctccaacaggttgaaaagctgataagcggtgaaataaacacctattcaatggaaaaacgttactacaaccgcaatggcgatgttgtctgggcgttgcttgccgtctcactggtgcgccacacggatggcacgccgctctattttatcgctcagattgcagacattaacgagctaaaacgcaccgaacaggtcaatcagcaactgatggagcgcatcacgctggccaacgaagcgggcgggattggcatctgggagtgggagctgaagccgaatatttttagttgggataagcggatgttcgagctgtatgaaattcctccgcatatcaaaccgaactggcaggtgtggtacgagtgcgtgctgccggaagatcgccagcacgccgaaaaagtgattcgtgattcgttgcaatcacgctcgccctttaaactggaatttcgcattgccgtgaaagatggcatccgccatatccgcgccctcgccaaccgggtactgaataaagaaggcgaggtcgaacgcctgctcggcattaatatggatatgacggaggttaaacagcttaacgaggcattgtttcaggaaaaagagcgcctgcacattacgctggactccatcggcgaagccgtggtctgtattgatatggcaatgaaaattacctttatgaatccagtggcggagaaaatgagcggctggacgcaggaagaagcgttaggtgttccgctcctgacggtgttgcatattacttttggcgacaacggaccattaatggagaacatttacagtgctgacacctcacgttccgcgatcgaacaagatgtggtattgcactgccggagcggcggcagctacgacgtgcattacagtattacgccgttaagtactctggacggcagcaatataggctcggtactggtgattcaggacgttaccgaatcacgcaaaatgctgcgccagctgagctacagcgcctcccatgatgcactgacgcatctcgccaatcgcgccagttttgagaagcaactgcgtatcctgctgcaaacggtaaacagtacgcatcagcgacatgccctggtgtttatcgatcttgatcgctttaaagcggtgaatgacagcgccgggcatgcggcgggcgacgctttactgcgcgaactggcgtcgttgatgctgagtatgctgcgctccagcgacgtgctggcgcggctcggtggtgatgaatttggtctgctactgccagactgcaatgttgaaagcgctcgttttatcgctacacgcattatcagtgccgtgaatgactatcactttatatgggaaggacgtgtgcatcgggtaggtgccagtgccgggattaccttgattgatgacaacaatcatcaggcagctgaagtgatgtcgcaggctgatatcgcctgttatgcctccaaaaatggtggccggggccgggtgacgatttacgaaccgcagcaagctgccgcacatagcgaacgggcagcgatatcgcttgatgaacagtggcggatgattaaagagaatcagttgatgatgatcgcccacggcatcgcttcgccacggctcccggaagcaagtaatttgtggctgatttcacttaagctctggagttgcgaaagcgagattattgatgaacaaacatttcgtcgtagcttcagcgatccggcacttagccatgctcttgaccaacgggtatgccacgattttttccagcaggccgcaaaagcggttgccagtaaaggcttaagcatcgcccttcccctttccgttgctggtttgagtagcgccacgctggtgaatgaactgcttgagcagctggaaaatagccctctaccagcacggttattacatctgattattccggcagaagcgattttcgatcacgcagaaagcgtgcaaaaactgcggctggcgggatgtcggatcgtattcagtcaggtaggccgcgatctgcaaatcttcaactcgctgaaagcaaatatggcagattacctgctacttgatggtgagttatgcgccaacgtgcagggtaatttgatggatgagatgctgattacgattattcaggggcacgctcagcgactcgggatgaaaaccatcgccgggccagtcgttttacccttagtgatggatacgctttcgggcatcggcgtcgatctgatttatggtgatgtgattgccaatgcccaaccgctggatttgctggtgaatagaagttatttcgcgattaactaagggagcgtttgcccattgcctgatgcgacgctaacgcgtcttatcaggcctacaaatcgctcattccccaggccggataaggcgctcgcaccgcatccggcgaccaacgtcatgcttcgtctggttgccagccttccgtataccagatatgcaacagcgcataagaacgccagggcttccagcgttcggcataacggcggatttgtgccggcgtcattcccggaaatcgctgtttaatcagataatcatccggcagaaaaacatctttcgcctgccagccacgcaaagcaaaataatttgcagtccagcgcccgatacccggaaaggtttgcagcgttttcatcgcttgttctacgtcgcccggtattgtcattggtaaggtgccctccagcgccgcatttgccagatgaatcagcgcctctgcccgtttcaacggcatacctaacgcttttaatgcctgcaggtcggctactgccagccgctgaggcgtggggaagcagacataatccggaaaatcatccagccgttcgccataaagctgtgccactctggaggtcaattttgccgccatcgccacgctcaccagttggcctaaaatcgcccgcacgccctgctcaaaagcgtcaacacaaccaggtaaacgcaatcctggccgcgccgcgcctaacttgcccaacgcaccgttaacaatctgcgggttacattgcagatcaaacaggcggctcattttcgccagacactctgcggcaacaggttctaaacctgcacttaaatttatgtgcagagtatggcgggctatatccggaatagcagtcaccacgccgcgatattcgcctaccgccagactacgggcataataactgtccgcgaccgtttccacgccgctcaccgcacgggcggcgagaaatcccaacatccacgaccagtcatacggcggctgccagttcagggtatacatcgcatctccttgttaatccgctttcagcataaacgttattcagacgttacgctttgctttcatattccggttgtcgcgacggcaacatttcgctaaagtcacgccccttcttcaccggcatggggattatttcgtgtttattggttttgattacggtacagcaaactgttcagtggcggtcatgcgcgacggtaaaccgcatttgctaaaaatggaaaacgacagcacgctgctgccttcaatgctttgcgcgccaacgcgtgaagctgtaagcgaatggctgtaccgccatcatgatgttccggcagacgacgatgaaacgcaggcgctgttgcgtcgggcgattcgttataaccgcgaagaagatatcgatgttacggcgaaaagcgtgcagttcggtctttcctcactggcacagtacattgatgatccagaagaagtgtggtttgtgaaatcaccaaaatcgttcctcggtgccagcggcttaaaaccgcagcaggtagcgctgtttgaggatctggtctgcgcaatgatgttgcacattcgccaacaggcgcaggcgcagctgccggaggcaattactcaggcggtgattggtcgcccgatcaacttccaggggctgggcggtgatgaagcaaacacccaggcgcaagggattctggaacgcgcggcgaagcgtgccgggtttaaggatgtggtattccagtacgagccggtcgcggctgggctggattacgaagccaccttgcaggaagaaaaacgagtgctggtagtggatatcggcggtggtacgactgactgttcattgctgctgatggggccgcaatggcgttcgcgtctcgatcgtgaagccagcctgctgggtcatagtggttgccgtattggtggtaacgatctggatatcgcactggcgtttaagaacctgatgccgttactgggcatgggtggcgaaaccgaaaaaggcatcgccctgccgattctgccgtggtggaatgcggttgcgatcaacgacgttcctgcgcaaagtgatttctacagtagtgctaacggtcgtctgcttaacgatctggtacgcgatgcccgtgaaccggaaaaagtggccctgttacagaaagtctggcgtcagcgtttaagctatcgcctggtgcgtagcgcagaagagagcaaaatcgccctttcaagtgtagcggaaacccgcgcctcactgccgtttatcagcgatgaactggctacgctgattagccagcaagggctggaaagcgccctcagccagccactggcgcggattctggaacaggtgcaactggcgctggataacgcccaggaaaaaccggacgttatctacctgaccggcggtagcgcccgttcgccgctgattaaaaaagcgctggcagaacagttgccgggcattccggttgcaggcggcgatgactttggctccgtcaccgccgggctggcacgctgggcggaagtggtgtttcgttaattgaaaaatggctcagcaacggcttaaatctgcctgcgcctgagccagtttttctgccgcctgacgtagcggttccatcaacggcatggtccgtgctggcgcatgaaggcggaatcgctgcaactctgtcgcaccgacagtcagcgccgattccagccgatgtcgtttggcggctatttttgccattaccgcttgtctgtctgcaggcgttaccgcttcgttcggcctgaacacaaaacggcgttcacagctcgctttccagtcgataaccgcctgggtcagatgatcaccaaaaccttttacttgcttaacgctccgtcgggtaacatccgctgctgtttcaataccaaaggaccgtaacgccgctttacgcgcagggccaacgctgggaatagaggcaacatcaataaaaaatccctccagaaacttctgcttctgccgttcccttgcggtgtcgtgaagtgctaccagagcgcgtttctcttcttccggtaacccgagaatttcgtccttcattttttcgagcatcgcccgtttggcgataaaaccttccagcccgcccaagtgttggatctggctgactaaatggtcatagtccattttcgcgcgattaaacgcctcacggcgttgctggatttctgctttgtacgctttgcttgtcaggctgccaataatccagatagccgccagcacaggaatcaaaataatataacgcggttctgcctgaaggccgcaaagcaacagcgataacgctgacagtgcgatctcaatcagaatgatgtattcgcgccgtaacaggcctgaaggaagcggcctgccagtcggttggaaatgatcgggtaatggcagttgcaatgctggcggtgctactgatgccatcaccatcgcccagactctcgccagcacaaaatcaccgccggtggtaatgacctcttcgccgagatcaataaaatagataacgccttgattatccagcgcacaccacgggcagtcagtcaaatgagcggggtaaacatgcattgccgaaacggtacatttctttaactgttggcgtagtaaatcaagtgccgctacccacgcttttgccgtcggacgcccggttgccacgccactttccgtgaatgcctgctgaaacatggcttcaacatcgcccggtaacatcgacagcggaatcgatcgtggcggcggttttaaaccacgtcgctgattatctgaggcgtaggcataacggaaatgggcaatatccgtctccagcgcattacctgcatcagagataagcggtacaccggaataaggatgccgcccaccaaacaagatgtgaaaaatcagcaacgcaaggccaaaattatcgtgattcgcggtacgttcaaaaccgacaaatgatggcaaggtttgtagctctggcggcgtaaaatgcgacacgccgacttcgcataaatgcagtgtgccattggcgttaatctgaaaggagtcactatcgatcaacaccactttgctgtcgcgacctaccataaagctgttctggtttacgtcccccacgacgtgcccgtgctcgtgaaccgtagcaaaagatgaagcaatattgcgcgcaacatagagtagaaaatcccacgcacaatgagggtaactctggcgacgatgtgccgggctatagatcatatgaatcggttctttaccagaaacttttggcatcataaaaccgataacttttccgcctcgtccaccgtgaagcgttgcctgcggccaggcgacataattcaacaactgcgcgtcagctgtcgcagccataaaggcaagtttgtcctgttttaaggcgggtggcggcgtgtgataaatcttggcgacgctatcgacaaactcctcgatatcataaaccgcaccttcgccgcctttgcccagttcacggcctggcgtaacgcactcaccagtagcagtatataaagtgggtttcatggtaaccacatagccagtgccaacgttttatcatcatccgtacgctcgtttaccgccgggctggacaaaaactgctttaacaattcaggtaataaatcgagttgttcctgcgttgctgacgccagtccattgaaaaacggggtaaagaaaggcacatgcggagaattatccagcatatttaacgccagtcgctgaataccatccgtaaatgctgcaactttatgcgcgcgctcagtgctggtgaaagtttccagtctggaaacggcatcttcatcagtaatgaagtgcgtcatattggcatattcccccaccatcggcgtgagcggcagttgcaaaccgtgccccaaatctaccaccacgccgccatcgccaatctgcataatcaaggtgccattagctgatgaaatcaatcccaaaaacgtgcaggcaaaatcgcgaaccgctaattctttggcttccgcctcggcaaaaagtcgctgacgaatggtcagcacaatgtccgttgcgaggacatcattaagccccaattccccgccctgcactttttgcgacatataagccatcgcttcattgacggcgagcatcgcaccttcgcctccctgcgaggcgctacctgcgccatcagcgacaaataccgacaataatggctgctggtcatttagccaggcaacctgtatctggcaggcatcctggcaaggcaagtccgcactgatgtgcgacgttccaacggctgatgcatagaccagtcgccagctcacactgacgtccagccttttggcgcttccagcacaacttccgttcccggcgtggagcgggaaaccgaacgcagcgaactggataaccagctaaacagttcacggaattgtaatccctgcagtggcaaaggctgacgaacgctgatttgtgccagcgtcttcatatccgccccctgaacgccgatggtaaagaaggcaaacttcttatcttcttccccctgaaacactttgttggcggcagcctgccactcatcggttggtgcaccatcggtgatcaggaaaatccacggacgataataggaaataccattggcacgatattcacgtttccgctcctcaaccatatccagggctttggtaatggcagagcccattggtgtatcgccctgggcaaacaggatgggcgggaaaaaattagcggcgctggtaaagggttgttccacatgcaccgggccgaacgtcacaatgccgagttccactctttttaaggccagcgaatcggcaagcagctcatcgcgaaaggtaaccaatccggcgttaagttcattaatgggtctaccgttcatagaaccagaaacatccagcagcaaaatgcaggggcaacgtggttccgggttactggcaaaatcgctggtggcaaacgtgatttgttcgctcataagaaatcctttcttagagaattattgaggtccagtatcataccgactgcaataatgaaataagagcaaacgaagaaactttcagaattaggcccggcagcgcagaagattttgctattcgcctcgcaagaacgtgggcttacagattgacaacaagggttgagtgacataatttcaggagtgagggtagagcggggttttccccgccctggtagtcttagtatgctgggtagctaatgactaagagcaccacgatgatgagtagcttcatcatgaccctttccttatttaaggccccttcctcgggaggggctttcccgtttcagcgtcccgctgaaatcttcggcttacctcctttcgccctgtatgcagtctatcgctgacttgcggataaaatagtttcaagtgtgattattgcgtaacgactcgcaaagaatatttgctggcaggatcgcagactgcaaagtctgcggattgacaattggaccgtgaaggcatactttcaggaatgagggttgagcggggtttcccccgccctggtagtcttagtaagccgggaagcttatgactaagagcaccacgatgatgatccacttcatcatgaccctttccttatttatggccccttcctcgggaggggctttcccgtttcagcgtcccgctgaaatcgtcggcttatctcctttcgccatgcaagcagtctatcgctaacgcgtagataaaatagtttcatgtgttattactggatgtgtgctcgcaaaagtgcccgtcattcagacgattcccgacagtgtttcataattcctccatttttctcccttattggctggctacactagtatcattccgcgaaacgtttcaggaagagaaactcttaacgatgaaaggcagttataaatcccgttgggtaatcgtaatcgtggtggttatcgccgccatcgccgcattctggttctggcaaggccgcaatgactcccagagtgcagcccctggggcgacgaaacaagcgcagcaatcgccagcgggtggtcgccgtggtatgcgtgccgacccattagccccggttcaggcggcgaccgcagtagaacaggctgttccgcgttacctcaccgggcttggcaccattaccgccgctaatactgttacggtgcgcagccgcgtggacggtcaactgatggcgttacatttccaggaaggccagcaggtcaaagcaggcgatttactggcagaaattgacccaagccagttcaaagttgcattagcacaagcccagggccaactggcaaaagataaagccacgctcgccaacgcccgccgtgacctggcgcgttatcaacaactggcaaaaaccaatctcgtatctcgtcaggaactggatgcccaacaggcgctggtcagtgaaaccgaaggcaccattaaggctgatgaagcaagcgtcgccagcgcgcaattgcaactcgactggagtcgcattaccgcaccagtcgatggtcgcgttggtcttaagcaagttgatgttggtaaccaaatctccagtggcgacaccaccgggattgtggtgatcacccaaacacatcctatcgatctggtctttactttgccggaaagcgatatcgccaccgttgtacaggcacaaaaagccggaaaaccgctggtggtagaagcctgggatcgcaccaactcgaagaagttaagtgaaggcacgctgttaagccttgataaccaaatcgatgccactaccggtacgattaaagtgaaagctcgctttaataatcaggatgatgcgcttttccctaatcagtttgttaacgctcgcatgttagtcgataccgaacaaaacgccgtggtgatccccaccgccgcactgcaaatgggcaacgaaggccattttgtctgggtactgaatagcgaaaacaaagtcagcaaacatctggtgacaccgggcattcaggacagtcagaaagtggtgatccgcgcaggtatttctgcgggcgaccgcgtagtgacggacggaattgatcgcctgaccgaaggggcgaaagtggaagtggtggaaacccagagcgccactactccggaagagaaagccaccagccgcgaatacgcgaaaaaaggagcacgctcctgatgcaggtgttacctccgagcagcacaggcggcccgtcgcgcctgtttattatgcgtcctgtcgccaccacgctgctgatggtggcgatcttactcgccgggattatcggttatcgcgccctgcccgtttcggcgctgccggaagtggactatccaaccattcaggtggtcacgctttatccaggtgcgagcccggatgtcatgacctctgccgttaccgcgccgctcgaacgccagtttgggcagatgtccggcctgaaacaaatgtcgtcgcaaagttccggcggtgcgtcagttatcaccttgcagttccagctaaccttaccgctggatgtcgccgagcaggaagtgcaggccgcgattaacgctgcgaccaacttgttgccgagcgatctgcctaacccgccggtttacagcaaagtgaacccggcagatccaccaatcatgacgctcgccgtcacctcaaccgccatgccaatgacgcaagtggaagacatggtggaaacccgcgtcgcgcagaaaatctcgcagatttccggtgtcggcctggtgacgctttccggcggccagcgtccggctgttcgtgtcaaacttaacgctcaggcgattgccgccctcggcctgaccagcgaaaccgtgcgcaccgccattaccggcgcgaacgttaactcagcgaaagggagccttgacggcccttctcgtgcggtcacgctgtcagcgaatgaccagatgcaatcggcagaagagtatcgtcagttgattatcgcttatcagaacggcgctccaattcgtcttggcgatgtcgctactgtagagcaaggagcagaaaacagctggctcggcgcgtgggcgaacaaagaacaggccattgtgatgaatgttcagcgccagcccggtgctaacattatctccaccgccgacagcatccggcagatgctgccacagctcaccgagagtctgccgaaatcggtgaaggtgacagtactttctgaccgtaccaccaatattcgcgcatccgtcgatgatactcagtttgaattgatgatggctatcgcgctggtagtcatgattatctacctgtttttgcgtaatattccggcgaccatcattcccggcgtcgcagtgccgctgtcgttaatcggcaccttcgcggtcatggtgtttctcgatttttcaatcaataacctgacgctgatggcactaaccatcgccaccggatttgtggtcgatgacgccatcgtggtgatcgagaacatttcccgctatatcgaaaaaggcgaaaaaccgttggcggcggcgctcaaaggcgcgggtgaaatcggctttaccattatctcgctgaccttctcgctgattgcggtgttgatccccctgctgtttatgggcgatatcgtcgggcgactgttccgcgaatttgctattaccctggcagtcgcgattttgatctcagcggtggtgtcgctgaccctgacaccgatgatgtgcgcacggatgctcagccaggagtcgctgcgtaaacagaaccgcttctcccgtgcctcggagaaaatgttcgacaggataatcgccgcctatggtcgtggactggcgaaagtgctgaatcatccgtggctgaccttaagcgtggcgctcagcacgctgctgcttagcgtgctgctgtgggtattcattccgaaaggtttcttcccggtgcaggacaacggcattattcagggcactttgcaggcaccgcaatccagctcctttgccaatatggcccagcggcaacgccaggtcgcggacgtgattttgcaggatccggcagtgcaaagtttgacctcatttgttggcgttgatggcactaacccgtcgctgaacagtgcgcgtttacagatcaatctcaaaccactggatgaacgagatgaccgggtgcaaaaagtcatcgcccgtctgcaaacggcggtagataaagtgccgggcgtcgatctcttcctgcaaccaacgcaggacctgactattgatactcaggtcagccgcacccagtaccagtttaccttgcaggccacgtcactggatgcgctcagtacctgggtgccacagttgatggaaaaactccagcagctgccacagctttctgatgtctccagcgactggcaggacaaagggctggtggcgtatgtcaatgtcgacagggacagcgccagccgcctggggatcagcatggcggatgtcgataacgccctgtacaacgcgtttggtcagcgactgatttccactatttatactcaggctaaccagtatcgcgtggtgctggaacacaacaccgaaaataccccaggcctcgcggcgctggataccattcgcctgaccagcagcgacggtggcgtggtgccgttaagctcaattgccaaaattgagcagcgttttgcgccgctttccatcaaccatctggatcagttcccggtaacgactatctcctttaacgtgccggataactattcgctgggcgatgcggtgcaggcgattatggacacagagaagacgctgaatctgccggtggatatcaccacgcagttccagggcagcaccctcgccttccagtcggcattgggcagcactgtctggctgattgtcgcggcggtggtggcgatgtatatcgtgctcggcattctgtacgagagctttattcacccgatcaccattctctcgacgctacccaccgcaggggtcggcgcgctgctggcgttaatgattgccggtagcgaactggatgtgattgccattatcggcattattttgctgatcggtatcgtgaagaagaacgccatcatgatgatcgacttcgcgctggctgctgagcgcgagcaaggcatgtcgccgcgcgaagctatttaccaggcttgtctgttgcgttttcgtccgatcctgatgactactctggcggctctgcttggtgcgctgccgctgatgttgagtaccggggtcggcgcggaactgcgtcgtccgttaggtatcggcatggtcggcggtctgattgtcagccaagtgctgacgctgtttaccacgccggtgatttatctgctgttcgaccgtctggcattgtggaccaaaagccgctttgcccgtcatgaagaggaggcgtaagtgaagttttttgccctcttcatttaccgcccggtggcgacgattttactgtcggtcgccattaccctgtgcggcatactgggtttccgtatgctgccagtcgccccgctgccgcaggtcgattttccggtgatcatggtcagcgcctcgctgcccggtgcgtcaccagaaacaatggcgtcttccgttgccacgccgctggagcgctcacttgggcgcattgccggagtcagcgaaatgacctccagcagttcgctcggcagcacgcgcattattttgcagtttgattttgaccgggatatcaacggcgcagcgcgcgatgtgcaggcggcgatcaacgccgcgcaaagtctgctacccagcgggatgcccagccgtccgacctatcgcaaagcgaacccgtcggatgcgccaattatgatcctcacgctgacatccgatacttattcgcagggtgaactgtacgatttcgcctcgacgcagctggctccgacgatttcgcaaatcgacggtgtcggtgatgtcgatgttggcggcagctcgctgcccgccgtacgcgtcgggctgaatccgcaggcgctgtttaatcagggcgtctcgctggacgacgtacgcactgccatcagcaatgccaacgtgcgtaaaccgcagggggcgctggaagatggtactcaccgctggcagatccagactaacgatgaactgaaaaccgccgctgaatatcagccgctgattattcattacaacaacggcggcgcggttcgtctgggcgatgtggcgacggtgaccgactcagtacaggatgtgcgcaacgccgggatgaccaacgccaaaccggctattttgctgatgatccgcaagctgccggaagccaacattatccagacggtagacagcatccgcgcccgtctgccggaattacaatccaccatcccggcagcaattgatctgcaaattgcccaggatcgctcccctactatccgcgcgtcgctggaagaggttgagcagacgctgattatctcggtggcgctggtgattctggtggtgtttttgttcctgcgttcgggtcgcgccaccattattcccgccgttgcggtgccggtttcgctgattggtacgtttgcggcgatgtacctgtgtggtttcagtctcaataatctttcgttaatggcgctcaccatcgccactggctttgtggtggatgacgccatcgtggtgctggaaaacattgcccgtcatctggaagcggggatgaaaccgctacaggccgcgctacaaggtactcgcgaagtcggctttacggtgctgtcgatgagtctgtcactggtggcggtgttcctgccgctgctgttgatgggcggattgccgggtcgcctgttacgcgagtttgccgtgacgctttctgtcgccattggtatttcgctgctggtttccctgacgttaacgccgatgatgtgcggctggatgctaaaagccagcaagccgcgcgagcaaaagcgactgcgtggctttggtcgcatgttggttgctctgcaacaaggctacggcaagtcgctaaaatgggtgctcaatcatacccgtctggtgggcgcggtgctgcttggcaccattgcgctgaatatctggctgtatatctcgatcccgaaaaccttcttcccggagcaggacaccggcgtactgatgggcgggatacaggctgaccagagtatttcgtttcaggcgatgcgcggtaagttgcaggacttcatgaaaattatccgtgacgatccggcggtggataatgtcaccggctttaccggcggttcacgggtgaacagtggaatgatgtttatcacccttaaaccacgcggcgagcggagcgaaacggcccaacagattatcgatcgcttgcgtaaaaaactggcgaaagaaccgggagcgaatctgttcctgatggcggtacaggatattcgcgttggcggacgtcaggctaacgccagttaccagtacacgttgttatccgacgacctggcggcactgcgcgaatgggagccaaaaatccgcaaaaaactggcgacattgccagagctggctgatgttaactccgatcaggaagataatggcgcggagatgaaccttatttacgatcgcgacactatggcgcgattgggaattgacgtgcaagccgccaacagcctgttaaataacgccttcggtcagcggcaaatctcgaccatttaccagccgatgaaccagtacaaagtggtgatggaagttgatccgcgctatacccaggacatcagtgcactggaaaaaatgttcgttatcaataacgaaggaaaagcgatcccgctgtcgtatttcgctaaatggcaaccggcgaacgctccactgtcggtgaatcatcagggattatcggcggcctcgaccatttcgttcaacctgccgaccgggaaatcgctctcggacgccagtgcggcgatcgatcgcgcaatgacccagcttggtgtgccttcgacggtgcgcggcagttttgccggaacagcgcaagtgttccaggagacgatgaactcacaggtgatcctgattatcgccgccatcgccacggtatatatcgtactgggtatcctttacgagagttatgtgcatccactgacgattctctccaccctaccctcggcgggcgtcggagcgctgttggcgctggagctgttcaatgccccgttcagcctaattgcgctgatagggatcatgttattaatcggcatcgtgaagaaaaacgccattatgatggtcgattttgcgcttgaagcccaacggcacggtaacctgacgccgcaggaagctattttccaggcctgtctgctgcgttttcgcccgattatgatgactaccctggcggcgctgtttggtgcgctgccgctggtattgtcgggcggtgacggctcggagttgcggcaaccattggggatcaccattgtcggcggtctggtcatgagccagcttctgacgctgtataccacgccggtggtgtatctctttttcgaccgtctgcgactgcgtttttcgcgtaaacctaaacaagcggtaaccgagtaaatgacagatcttcccgacagcacccgctggcaattgtggattgtggctttcggcttctttatgcagtcgctggacaccaccatcgttaacaccgcgcttccctcaatggcgcaaagcctcggggaaagtccgttgcatatgcacatggtcattgtctcttatgtactgaccgtggcggtgatgctgcccgccagcggctggctggcggacaaagtcggcgtgcgcaatattttctttaccgccatcgtgctgtttactctcggttcactgttttgcgcgctttccggcacgctgaacgaactgttgctggcacgcgcgttacagggcgttggcggcgcgatgatggtgccggtcggcaggttgacggtgatgaaaatcgtaccgcgcgagcaatatatggcggcgatgacctttgtcacgctgcccggtcagatcgggccgctgcttggcccggcgctcggcggtctgctggtggagtacgcatcgtggcactggatctttttgatcaacattccggtggggattattggcgcgatcaccacactgatgttaatgccgaactacaccatgcagacgcggcgctttgatctctccggctttctgttgctggcggttggcatggcggtcttaaccctggcgctggacggcagtaaaggtacaggtttctcgccgctggcgattgctggcctggtcgcagttggcgtggtagcactggtgctttatctgctgcacgcccaaaataacaaccgcgccctgttcagtctgaaactgttccgcactcgtaccttttcgctgggcctggcggggagctttgccggacgtattggcagtggcatgttgccctttatgacaccggttttcctgcaaattggtttcggtttctcgccgtttcatgccgggctgatgatgatcccgatggtactcggcagcatgggaatgaagcgaattgtggtacaggtagtgaatcgctttggttatcgtcgggtactggtggcgaccacgctgggcctgtcgctggtcaccctgttgtttatgactaccgctctgctgggctggtactacgttttgccgttcgtcctgtttttacaaggaatggtcaactcgacgcgtttctcctccatgaacaccctgacgctgaaagatctcccggacaacctggcgagcagcggcaacagcctgctgtcaatgattatgcaattgtcgatgagtattggcgtcaccatcgccgggctgttgctgggactttttggttcgcagcatgtcagcgtcgacagcggcaccacacaaaccgtctttatgtacacctggcttagcatggcgtctatcatcgcccttccggcgttcatctttgccagagtgccgaacgatacgcatcaaaatgtggctatttcacggcgaaaaaggagcgcgcaatgaagttctggcgacccggtattaccggcaaactgtttctggcgattttcgccacctgcattgtcttattgatcacgatgcactgggcggtacgtatcagttttgagcgcggctttatcgattacatcaagcatggtaatgaacaacggctgcaaatgctcggcgatgcgcttggtgagcagtacgcccagcacgggaactggcgcttcctgcgtaataacgatcgctttgtatttcagatcctacgttcactggagcatgataacaacgaagataagcccggccccggtatgccaccacacggctggcgcacgcaattttgggtggttgatcaaaataataaagtgctggttggcccgcgagcaccggttccacccgacggcacacggcggcccattatggtcaatggtgcggaagttggcgcggtgatcgcctcccctgttgaacgactgacccgtaatactgatatcaattttgacagacaacagcggcaaaccagttggctgattgtggctttatctaccttattagcggcgctggcgacattcccactggcgcgcggtttgctggctccggtaaaacgactggtggatggcacgcacaaactggcagcgggtgatttcactactcgcgtagcccccaccagcgaagatgagttgggcagactggcagaggatttcaatcaactcgccagcacactggagaaaaaccagcagatgcgccgcgattttatggccgatatttctcatgaactgcgcacgcctttagcagtactgcgcggcgaactggaagccattcaggatggtgtgcgtaaattcacgccggagacgctggcttctttacaggcagaagtcggtacgctgacaaaactggttgacgatctccatcaattgtcgatgtctgatgaaggcgctctcgcctatcaaaaagcaccggtagatttgatcccactgctggaagtggcgggaggcgcatttcgcgaacgattcgccagccgtggcctgaaattgcaattttccctgccagacagtattaccgtatttggcgatcgcgatcgtttaatgcagttgttcaataacttactagaaaacagcctgcgctacactgacagcggcggcagcctgaaaatctctgccgaacagcacgacaaaacggtgcgcctgacctttgccgacagtgcgccgggtgtcagtgacgatcagctacaaaaattgtttgaacgtttttatcgcaccgaaggttcccgcaaccgcgccagcggtggttccgggctggggctggcgatttgcctgaacattgttgaagcacataacggccgcattattgccgcccattcgccttttggcgggcttagcattacagtagagttaccgctggaacgggatttacagagagaagtatgaccgagttaccaatcgacgaaaacacaccgcgtattttgatcgtggaagatgaaccgaagctggggcagttgctcattgattatctgcgtgctgcgagctatgcgccaacgttgattagccacggcgatcaggtactgccatatgtgcgccagacaccaccggatctgatactgttggatctgatgctccctggcaccgatggcctgacgctgtgtcgggagattcgtcgtttttctgacattccgatcgtgatggtgacagcaaaaatcgaagagatcgaccgcctgctcggactggagattggcgcagatgattatatctgcaagccgtacagcccacgggaagtggtagcgcgcgtcaaaaccattttgcgccgttgcaaaccgcagcgcgagttgcagcaacaggatgctgaaagcccgttgattatcgacgaaggtcgttttcaggcttcctggcgcggtaaaatgcttgacctgacgcctgcagaatttcgtctgctgaaaacgctctctcatgaaccaggaaaagtgttctcccgcgagcagttgctgaaccatctttatgacgactaccgcgtggtaaccgaccgtaccatcgacagccacattaaaaacctgcgccgcaagctggaatctctcgacgccgaacagtcatttatccgcgccgtttacggcgtcggttaccgctgggaagccgacgcctgccgcatcgtttaacatttttacctgccggagatggccttcagaccagatccggcaacattatcccacgcatggtcagcaaactgacattatctctccgccctggcaggcaccagaaaatcgctcatactttaattggcaaacagtacctttagatgctgttttcgatacgcaatttcaatcaaggagtcattatggctggttggtttgaactcagtaagagcagtgataatcagttccggtttgtgctaaaagcgggcaatggtgagactatcctcaccagcgagctgtatacctcaaaagcctctgcggaaaagggcatcgcgtcggtgcgtagcaacagcccgcaagaagaacgctatgagaaaaaaacggcaagcaatggcaaattctatttcaatctgaaagccgccaatcatcaaattatcggctccagccagatgtatgccaccgcgcaatctcgtgaaaccggaattgcctccgttaaagtaaatggcacaagccagacggtgaaagacaatacgtaattacgatgccgggcgtaggttgttggcgtccggctttatatcaaaataacgcttatttattgataattaagattaacctccgtcattaaaataatgagtaaataagtttcagtatcagaatttatcacgccccacaatcaccaatctgatccaccaccgtcagataccagtcactgtcataactgtaaagttgacttaaataaaataccagtccatcgttactctcttctggcgcagcgaccacacgcacggccccgtattccattcgacgcgctgcggcaatctgcgcatcagaaatagtattttgcggtgaaccaaacatctgcgtgaagaccaaactacggctgactttatggtgaacatcgctattgctaataaaatacccctgcttattccagccacgttcgcagttaaatttcgggatagctttcttattaaattcgtcatctcgcggaacatgttcccctgccgagggccatgggaaatactcgggaacaggttgcctgaaattaatttgcttaagattttcaacatccatcgaagcaccacggtggaaaagaacatacaaacccgtttttttatcaattaacgagttgattaattgggcatcttcttgctgaaagcccataatcacctttctggctgtttcctccagcgtacacccggcattggcgggtaaagaaaagaatatcagccccaccagcatcattcctttttttaacatcagcattgtttgcatcttctcatcatggggctcatattacaaatttaacaattttcaggataaaccttacaccatactgttaacctggccgggtaattcgctagctggaatacgaaaggtataccaggcataacgacagcgtttccacaggctggagaaatggagatgataaaggcaatctgcaataatttcgttatctggatataaagactcggcaaaatgtgtccagcgcgcactgagtttcatgttaaacagtttttcatcttctttgttaccatacaggcgcgacaaagtaatcattgcttcgagcgtacctttattcgcttcttcttgtacctgttggaggtgcaaatgagcaagtgagagttctttcacctcaaagatattaagtaaaaaaagcccccatgctttttcatgtccagcttcatgagccagaaataaattgtcaaggagatttttttcataaatagcccgtgtttctttagaaatttcttgtttatttagtgcctggtagcagatagcaatgctaaaataaatattttgtagatcttgttgatgttcgctataaccataattttttaccagtggataagataccgagctatggaaatttaggtcatcttgaagtattttaagtgcccgtcgaaaatactccaaagctgtagatggttcataaggtaattttgtattgtcttccttatccaaatattcaagagcaactaaatttaatgcggcaggaatatttctttgcttaccaattgtcgcaagcggaatgaaataatcagaaaggtcaaaccaactcaaatcttttattgccgaccgccaattatgattgtatttaatgtcactagctttttccagccaagcatcgccctgcccttcatctttttcaaaacccaaaataccctctcgctggaaaaaccccctataaataacaggtgtagcataagttgtattctgtgaattttggcagataaaattatatatccagaatgaatctggataataacttaatgcaaattttatcgcgtacgcagtgtaataattattgagcttcatgtcttccatcaccgctcgctgtatacagcaccacaacttatcgtgatcgttctgcttgttatagcaggcaagtaaccactctagggcattatggcgacattcctgaaattgtgcgtactgagcaatattctctgctaagtcgattgcatattgttgctcctcgggcgcaatgtcctcaatgctgacatctcggtaatcatcccaccaaagtaagagatccatatagtcatgttcttcggtagataagtgcttacaggttactgaatccagcaattcggaaatttctttatgcgaccctccccagcgtggcattcgaaatggtatatattcaacaaaaggataaaaagtgtgaggaaaaatagtcaggcaaacagaaagccaatatttttgcccaccatcatcatcatactcaggaagtatattggggcgaggcaaaacggggcatattgcatgctcaaacgaaagtccggaatacgccatcaacgcttccacttcttgcggggagcggcggtgataatttttcagtgcgatcattaatggtattcctgcgacactatcaccgttaaggtgtgccgccagccaggctggctgaccaaatacttttgagttggtgctggtaagtaatgcagccatccattgtcgtgggtcacaatcaattgctttaagtgtagcgatgaccatttgttcattacatgcaccagcacaaagccacattgcatgtgtggtatcatttgcccagccataactgcgatataaccatgcacggtgattccagtattgtgcttcggcaagccaggcatgtgtagaatgaggtcttgcttgctgccaggttttaatgagtcttaaaccttctgttccggcatcaactagcgtgttcatatcataaaaatagttgcacatttgggtccaggataaaaaatagcgcttttcagcctgacgagaagtgaaactctcctgtaatacctggttataaatttcatctagttcctgataacgtttttcttgtaacatataaggaatatttgcgatttgccattttctctcaagagtattaagtggcattttttggtcacacatcttttgcattgcactgagtaaacgagcatcctgttccatagatatccttttaattaggttcaaaaattttaaattcattccacggcaattttttccagttactggatggatctttcaaccatgcagtgacttcctttaaatcacggttcgcagtggcgacgggggtatcgtatatcattaaccatttttgtcgggcgcgaacataagcactggcataatcttcccatgaagcgaaacaatcttgtgctctttgagcattcagtaataacactatccaggcctggttttcatcgcaccagcctaaaccggcgatgcaacgagttaaaaaagcagtgcgcatacagtcaaacgccagcccatccagaacctggccttgtgctgccagttgttcgtaaaaatcatgtggagaattaccaagccctgtagcccagcgctgtaatataacgccaatttgttgacggaaatcttcgttgctttggtaagtttctgttcctagctcttgtttaacctgtagtgcaagttgttgacgcttatcatcagtcaactttaaatctaacgtgaagccatttactgacagtccattacgacgagcaactatatcaccaattgctaatgcccacttacgtctctttgttgctcgtcttttgtccttgattagatccttttctttttctttagcaataaaagcatcgatttgtggtttgttttttttgtatctatagataaaaataaatattgcgaccaggagaacaatgataagactcattatttttcaacctctgacaggggtaagtaatgagatgtctgtaatgtcaaactctctatctcaaaggaaatgttgctgatattttgacctgcaaattgcggatgccactcagcgccagggaataacatttccgcagaagtagcaactatagggtcaatagcattaagataatgtaacttatcaggtgcgctgtgtaacagtaaccactgcaactccactgaaggatttgtaaaatgttctaataaatgaaagttattatgtagtacgcttagtaaaaaactggtttcgtatacttccgttacatatttccacccctgatattcaggtgtattttcataaacaatacccataccttcacaatcactatgtcgaactgcttgtggtgataatagttgcaaaagagacaaaacatcgtccgcatattttttaactggatgacgattttgcttaccttttatttgatcaatttcaagtgaatcaccaacaacattgagagcaatagtaacatgaggaatattattattatcacgcaaactgaataaccgtaatttatgttgctcaatttgatttgcataatactcaccataaccaccggtaagattttttcgatcatcaaactggcctacgcaatgttgcatatgccatgattcataagccatttcacgacgaaagttcgaatgactggcatcaaactcaacaatttttccgtctggcacatcaagtattgactttacagtattttgttcactcggctgccaccctttctcgcgtcgttgaagcatcttttcatgctcttcttcacgcattctgaacgcaacgtagcaggttatgcgctgtagttttgattccagacgggtaccacatttcctggaaagaaattccaccaactcccgttctttggttaatatttgttgatgatcggtttcgatataataaagtgtcgcagttgatactgaggcagtattaaacttcgataccagccattccgggattacatcatcatttttattaaacagtgaatattctgcaagcgagttaatttgttgcaccattggaaagtcactaattagccatcgataaaaatggttgagtaaccatttttggatggtctcattatcctggcgaaacagacttctttgcaaaattgctgtttttacttccggggcattaattacatcccttgcattataattctggtgaatatttccagtcataacatccgcccgtgtttattatatcactcaaagcaataattgttgactatagattttttatctaaatcagcatggttgcaggtacatactcaagtaagccactcaagaaaataacgaaaactcaatagtggcagcgtcacaaactttggaaattatgtcttatatttgcagtttattttagtgaataattgagataaatgacattattttacatcctcaataattcaggctgtaagaggacggcaaatacattcataattatcaggggatgaacattcaggaaagtggtcagtatcgtcaactttttcttttatcactacatgaagatttcgtgtagatactcccatctctgccacttctcccctcacatttacactggagctaaacccgccgattgcgctacaatgcccgcccttaaagtgggggcactcccctaaccgcttcatcaggtgaagcggctctgacctgtcatcagaacgagagaattatgtttaaaccggaactcctttccccggcgggaacgctgaaaaatatgcgttacgctttcgcttatggcgcagatgctgtttatgcgggccagccgcgttactccctgcgtgtacgcaacaacgaattcaaccacgaaaatcttcagctcggcatcaatgaagcccacgcgctggggaaaaagttttatgtcgtggtcaacattgcaccgcacaacgccaagctgaaaacctttatccgtgacctgaaaccggtggtggaaatggggccggatgcgctgattatgtccgatccagggctgattatgctggtgcgtgagcacttcccggaaatgccaatccacctctcggtacaggctaacgccgtaaactgggcgacggtgaaattctggcagcaaatgggtctgacccgcgtgatcctctctcgcgaactgtcactggaagagattgaagagatccgcaatcaggtgccggatatggagatcgaaatcttcgttcacggcgcgctgtgcatggcctactccggtcgctgcctgctctctggctatatcaacaagcgcgacccgaaccagggcacctgcaccaacgcctgccgctgggagtataacgtccaggaagggaaagaagatgacgtcggcaacatcgtacacaagtacgagccgattccggtgcaaaatgttgagccgacgctgggtatcggcgcgccaaccgacaaagtgtttatgatcgaagaagcccagcgtccgggcgagtatatgaccgcgtttgaagatgagcacggcacttacatcatgaactcgaaagatctgcgcgccatcgcccatgttgaacgcctgaccaaaatgggcgtgcattcgctgaaaatcgaaggccgtaccaaatctttctactattgcgcacgcaccgcgcaggtttaccgtaaagctatcgatgacgccgctgcgggcaaaccgttcgataccagcctgctggaaacgctggaaggtctggcgcatcgtggctataccgaaggtttcctgcgtcgtcatacccacgacgattatcagaactacgaatacggttattcggtttctgaccgccagcagtttgttggtgagtttaccggtgagcgcaagggggacctcgcggcggtagcggtgaaaaataaattctccgttggcgacagccttgagctgatgacgccgcaaggcaacattaactttacccttgagcatatggaaaacgccaaaggtgaagctatgccggtcgcaccaggcgatggttatactgtgtggctcccggtgccgcaggatcttgagctaaattacgcgctgctgatgcgtaatttctccggggaaaccacgcgtaacccccacggtaagtgattaatttcgattatttttcccagatggaaaattcttagaaaccgatcacatacagctgcatttattaaggttatcatccgtttcgctgaaaaacataacccataaaatgctagctgtaccaggaaccacctccttagcctgtgtaatctcccttacacgggcttattttttatgcataagccctatccctggtcaccgtcttccattgaccacatcgatagaatcctccttcatagcacgatgcttttcacttatcgacatcgtgctcgcacaggttccggttacgcacagccagaacgcgcatgtttgacgcttaccaaaaaatgaacctaaagcattggaatatttttgacatcattttctgatggctgcataaaataaaaattctgctttagtttcatctatctgtttgtcattattactcacattcaataatggtgttgaagaatatcccatcacagataaaataaatatgtgcatggtagtcttgaatctattctcactctccacatttgaatgtcagacgagcgacgccatgtaatcctgcaccttctgtcttcaggtcaactatctgcatttttttgccctgagtaacacagaaatgagttgcatcattttttactatattttctgcaccagatattctacccctggctaaagaagcttcggcttcggtgtagtattggttatcgagtttacgctgaatattacttttatatgcaaggccaaatttaccgatacttgtctcatcattatgcacagcacaaccagacataagaaaaacactaattaatgatatagcagctatctttttcaccttaccttctcccattaattaccaacgacattctctagtgtttaaatataataatggcatgattattatatttgaataggattataataaatgttttgtacaacatttcctacataagtaggaattacagacatggagacccttccgggtaaccccatgggagactttaatatattttgaatagtatattgaagatgccactgtttagttgaatattagatatattctcttttttaaaatttatcagtggctaccattaatattcgctgtccccattgtaagctcctggtggtaagcactgaatccccatacctgaactgactttttatcctccgactttcatcctgttctgactccaccttttcttttctgctctacactatctacagaccaatcataaaggcacatacgatcatggcagaatttcccgccagcttactgattcttaatggcaaaagtactgacaatctacccttgcgcgaagcaatcatgctgttgcgtgaggaaggaatgacgatccatgtgcgggttacctgggagaaaggtgatgccgtacgatttgtagaggaggcccgaaagttaggtgtcgcgacagtgattgccggtggtggcgatggcaccattaatgaagtttctacggcattgattcaatgtgagggggatgacatacccgcgctgggaattttgccattaggaaccgccaatgattttgccaccagtgtagggattcctgaggcactggataaggcgctgaaactggcaattgccggtaacaccattgcgatagatatggcgcaggtcaacaaacaaacctgttttattaatatggcgacaggcggatttgggacgcgtattaccacagaaacgccggaaaaattaaaagccgcgctgggtggcgtctcttacatcattcatggcttaatgcgcatggatactctgcaaccggaccgttgtgagatccgcggtgaaaactttcactggcaaggtgacgccctggtcattggtattggtaacgggcgtcaggccggtggcggtcaacaattgtgcccgaacgcattaattaacgatggcttgctgcaactgcgcatttttaccggcgatgaaattattccgactctcgtatcaaccttaaaatctgacgaagataacccgaatattatcgaaggtgcttcgtcgtggtttgatatacaagccccacacgaaatcacttttaatcttgatggcgaaccgttgagtgggcaaaacttccatattgaaatacttccggcggcgttgcgttgccgattaccaccagattgtccattgttgcgttaatcaaactattctctgttgaaccagagagaatccgtaatgccggatgcggtgtaaacacctcatccggcatacagaacaatactacaccgtaattaattttacccgtgtcttctgcaatgccagtttatccacctcagacacagcatcatcggtaataataatgtcaattttttcgattggcagtacctgattaaaaccgcgacggttaaatttcgatgaatcgagaacggcaatcactttattagcagcggtgaccatcgcaccgctaacagaataaccttcattaaaggtcgtaataccattaaccgcatcaataccatcagcacccacaaacattaaatcggcattaatatcctgcagagaacgttcagcaatagatccatgcatagatcgcgttttatggcggaccgtgccaccgcagacgaccagagtaatgtctttattttcggaaagggcaaacgcagccgggagactgttggtaatcaccgtgatatttttggcggtcattaatccttcggcgataagcattgtcgtacttccgctgtcgagaataacggtcatcccttcgtggatcattttgactgccgcctgcgctattctgtttttcggcgcgctggcgagctgaaatcgctctttaaacccgacttcctgggtctcggtttcgctattaccggacattattttcgccgcaccgccatgaaagcgcgtaaccacgcctttttgttcgagaaagcgcaaatcggcacggattgtcgcttccgaggcagcaaatactcccgccagatcctgaacaagcacggttccctgttcattcactaattggatgatcttattccttcgctcgaatgaattcatcgtcatttacccatattcaattgtggctagtgtaaacgaagggggaccattggtgaatgatctgttttgcacaataccgggcctgcatcacgctggcccgcggtttcagggaatgagcaacactttgcccggcatggcattacgagcgatgtcacgcaccgcctgggcgaagctttcaaagcttccacggtgagcgattaatggctccaggcttaacttacgttctgtcagcaaccggctcgccgtttcccactcctgccccggccaagggctggagtagttcatccaactgccgataaccgtcagctctttacgcaatattttgccaaacgttgcagatgttaaatgcagatcctgatgcaacgtgcctaccagcgccagttgggcatgaggaccggcaatctctaccgccagttcgacggtttgcgggacgccagccgtctcgaggataagctgattaaagcgcagatcgcgtaaaacgccctgtatttgcggcgcgctcatttcacggctgttaaatgtttgcatcgcaccgaaagattttgccagtgccagtttttctgagctaatgtcgatagccgtcacactctttgctcccagcgcgacagcgcactgaattgccagcaggccaatggttccggcaccaataataataacgtttttattctcacatccttgcgctaaatggaacgcatgcaggccaacggtaatcggttcaataaaagcgccatcctcaataggcatatccgcaggtagtgcaaagacattgtttcgcttaacgacaatatattcggcaaatccaccatcacgccgtgagccaataaaatcatattttgcgcactgggaataaaaccctttcagacactctggacaagtaaaacagggtaataacggcacacaggcaaccgcatcgccggggtgtaaatcatcaacaccggatcccaccgcatcaatatagccgctaaattcatggcccaacgttattggataataatgtgcaccatttttaaatatcctgggtaaatcggaaccacataagcccgagctggcaatttttacccgcacctcatcctgatgtttaatttcaggaatgacgctttctgctacgcgcacgataccatcagtatcattcaccactgatttcataaaaactcctgattgttaagggggataacctccccctcaggtaaaaattattctgcgagaacggctttctcttgtttaataaagccacgcgctctacgccaggtcatgaaaataccggtaagataaattgcgccgataacaatgaaaccgggaatattttgcggggagaaaacctgaatcagtaaccaggtaatgggagaaccgccctgatccattgaagccaccatacccccggcttttaacgcgcccgcattagccgccagttgggtgtgcaaaccaatagtttgcgtcgcgatccacagggtgatgctcataatgatgacacccgaaattaaggtgcggaacagatttccacgatgcaccgcgaccgccatcgccacaaagaagccgatggtggcaaggtcgccaaacggcagcacctgattacccggcacacaaacagcaattaaaatggtgagtggaataaaaatcaggcttgccgataccaccgccgtatgtcccagcagcaacgccggatcaaggccaatcaggaactcctgaccgccgaacttcgcctgtaaacgactacgggcctgcttagcgatgggcgttaaaccatccatgatgggtttaatcacccgtggcatcagcagcataactgccgccgtttttaccgccagctgcaatacacctttgacatcgtaacccgcgaggatgccgataatcagtcccatcacaaaacccacggtgacgggctcgccaaaaggaccaaatttgcgctggatatcgtcggcactaaatttaatacggttaacccctgggattttctcgatgatagcatccaccagcaccgctatcggccccagatacgccgatgtaccgtgcggaatagcaatgccttccagctcaaagaaatttcgggtatcgcgggcaaaccagtcgccgagtttataaacaaacgccgcgtgaataaccacacccgccatccctatcatccatgaaccggttgccagatgcagcaacgcgccggtgaaggtcatatgccagatattccagatatcaacatttaccacccgcgtcatacgggtcagtaacatcgccacgttaaccagaatcgcaatcggaatcgccaccagcgcaatttgcgacgcccaggtcatgggtgaagagcccggccagccgacatcgaccacatgcagattcaggtcgaaattttccgccatcgctttcgccgccggaccaatggaatccagcattaagccaatcacaaggccaatgccaacaaagccaatcccgatatgcagacccgctttaaagcaatcgcctgccttcatgcctaatattttagaaaaaataatgatgacaatcggcagcatcaccgtagggccgaggtcgagaatataacgcatgacttctgaaaacataggtcacccctgtaagatagtcagaattttattttgtaatgcttcgataccgacaccagaaacaaaaggcatgccgtgaactaacggaatatcgccaaaactacgatccaccctggcagtggtgcatatcaaatgcacgccatccatataggtttctatttcattaacccgacactggattaattcaacaggaatattatgactctgacacaactctttaatttcttccgccgccatcgtagaggtcgcaaccgcgcctccgcaagcgacaataattttgcgtttcataaatagtcctttttattgttacagagggatttattcgtctgaatctaaaacatactttgtgaagtattcctttaactgggtttcaggaagagtgattagtgtctcgacgatatcaggctgttgtaacttgccaaataaacagcgtaaaagtttcaattgctgctgcggattttccacaatcaacgcaataaccaacgataccgccacgtcgttatcatcatccgcttgctgaaaatgaactttatttgttggccttaacagataaatggctgacgacttagcatgaatcgcctcacaatgcggtattgcaatggcgtgctgctcaagcattatcccggtagggaattctgcttctctggcaattaatgcctgtggccaggtatcatgaaccacacctttcgcgagcatctcattaccgatatgggttaaaacttcgctacgatcgacaaaagaaattccgctacgaacaaacaggttagtcatataccgtccttattccgcacagccgtagcgataggcgcgcaaaacatcataaattttatccataataagctgatgcggtattgctgataattccccggactgaatgcgttcaaattgtttcggaagatactgactaatcatgcccagtgggatgtccacgccttccagattcaccatcatcgtttcgacgctatttttaatccggctatgcggccagtaataacgaatacgatccgacaggctgtaacgaatatccagcaatgaatcgttaaaacccgtgcgataatattttttccagtattgcggttcgtcgagcatcacttcttcaatcaccgccagacaacggctacgattttctggagcgatgagttcctgctcaatttgtgccagcgcaaatatcgcctcgcgtaacgcaaaggttaatgccggaccgactttcaaaattgcaaaatgatcgcgaactaattcccgataggccgtctgagtctggtaatcggtggaatgcgcttcataaaccattttggttttttctatccattgcgccaacgcctgagcttcttgcgcctgataatgaataatattgctatggtcaaattccacacccggctgcaccacgatggcaatcacgcgtgttaacgcctctgccagaccacgggcaataaaggccttttgatgcgtgcgtaaagtattggcggcatcttcaacctgggtgatgtgtactgactgaatggcgctggcctcaccgcccggaaccggaacttcggtgccaatgacatagttcagttgctcacgctggcaatcagtcgccacactttccgccgccagacaaagcacagcggcacgttcagcaaccgtttctggcgctaacggtatggaatcgtcagcgcaggacattgacgcatcaagatgaattttactgaagccggcacgaacatatgcctttaccagctcgacggatttttccatcgccgcatccgcattttcttgctgccagcagtttggtcccagatggtcgccgccgagaataatacgctcacgagcaaatccgactttatcggcaatcgcaaaaacaaattcgcgaaagtctgccggtgtcattccggtataaccgccaaattgattgacctggtttgacgttgcttcaatcagcactttacgcgtgctgttgcgatcaaatgccagcgccgcttcgataaccaacggatgtgcagaacagactgaacatatgccaatatgttcaccagctttatgccgggcaattaacgttttcatgttttttccttgttaaatggcaggtgcgttatgccctgccctcgcagccacaatcggcaatcactttgctcaccacatcgcgcattgcagatttagccgactgcaaataatcacggggatcggtcgcttcggggtgctcggtcaggtaattttttaacgcctgcgagaaggcattttttagctctgttgcaacgttgattttgcatatccccagtttgatggtttgctgaatatccttagtcgataatcctgacgcgccatgcagcaccagcggtaaattcacccactggcgaatgttctccagtcgagaaaaatcaagcgccggtgctctggcatacataccgtgagccgtgccgatggcgaccgccagggaatcaatcccggttgcctcggcaaattcacgcgcctgaacggggttggtataaaaagcatcggcttcattgacttgcacatcatcttcctggccgccaagttgccccagctccgcttcgacgctgacatcaaagcgatggcaaaaatccaccacctctttgacccgtgaaatattttgcgcaaaaggcaaatgcgaggcgtcaatcatgactgagcgcacgccagaacgaaccttctgagcgatatcgtcaaatttcgtgtgatggtcgagatgaatcaccagtggatggtgatattgcttcgccatcgcgctgaccagcgccatcagattttctgtaccggcatgagtaaatgtgccgggcgttccggcgatgatgaccggcgcatgcatgctggcagcggtttccaccaccacttgcatcgtttcgagattgtgaatattgaatgccggaaccgcataaccgccgcgctgtgcgttgttcagcatctgctttgtcgataccacgtacattttcatatcctgtcgtttgttttcgatttcaaaacataatgaaattatttgttttcaaatgtcgagataacgatcacaaaaacgacaatgtgaaaattaatcagaatgacaggcaaataaatagcaaaaaaaaacggcctcccgggggaagccgtaacaaagtacgcgtggttttatgccggatgtggcgttaacgccttttccgtcctacggggtggtgctgttcgtatgaggcgcatcaggcgatagtaattttgctatcgagataaacgtcctgcacggcgttaatcagtttcacgccgtcagccatcgatttcttgaacgccttacgtccaagaatcagccccattccgcctgcgcgtttgttgataaccgcagtacgcactgcatcgctgaggtcagtttcacaaaaaaaacggcctcccgggggaagccgtaacaaagtacgcgtggttttatgccggatgtggcgttaacgccttttccgtcctacggggtggtgctgttcgtatgaggcgcatcaggcgatagtaattttgctatcgagataaacgtcctgcacggcgttaatcagtttcacgccgtcagccatcgatttcttgaacgccttacgtccaagaatcagccccattccgcctgcgcgtttgttgataaccgcagtacgcactgcatcgctgaggtcagtttcaccgcctgcagcaccgccggagtttatcaacccggcccggcccatatagcagttagctaactgataacgcaccaggtcaatcgggttttcactggtcagtttgctgtagactcgatcgtcggtataaccgtaattaatcgctttatagccgccgttattttccgccattttttgtttgacgatatctgcacctatggttgccgccagatggttcgcctgaccagtcaggtcggcggaaacatggtaatcaacgccatctttcttaaaggcggagttacgcaaataggcccacagcactgtcaccatgcccagctcgtgcgcacgttcaaaagccgcagaaatttcttcaatctggcgacgtgactcttccgagccaaaatagatagtcgcaccaaccgccaccgcgcccatattgaacgcctgctccacgctggcatacagcgtttgatcgtaggtattcgggtaacttagcgtctcgttgtgattaagtttgacgaggaatggaatgcgatgcgcgtaacgccgcgataccgatgccagcacgccgtaagttgacgccacacagttacagcccgcttcgatcgccagttcaacaatgtttttcgggtcaaagtagagcgggttagcggcaaatgaagctccggcagagtgctcaacgccctggtcaaccggcagaatagaaagatatcctgtgccagccagacgcccggtgttgtacaacgtctgcatattacgtaacaccgctggcgggcgattattgtcaatcatcacgcggtctacgtagtcatgtccggggagataaagctggtcagaaggaatagtcatacaacggtgctgtaaaaggttgtcggcgtctttgccaagcaactgcgcaatatctgtcattactatgctcccgtaaattccgattggatatcggctatggattgtcctggcccgccttttgcgggcaatcataatcctggtcgttacgggcgagtttttccatcttttggatgttttttcagcgttttctgttggctcgattcatcagaaaaaatgttaccgcggtcaagttttcaccgcaaaggtatttaaaaggtattactaagtggtattgtcatcgcgtaccttacattacctgtcatgaaggaattaaaagatgaaaacaacagcaaagctgtcgttcatgatgtttgttgaatggtttatctggggcgcgtggtttgtgccattgtggttgtggttaagtaaaagcggttttagtgccggagaaattggctggtcgtatgcctgtaccgccattgcggcgatcctgtcgccgattctggttggctccatcactgaccgctttttctcggcgcaaaaagtgctggcggtattgatgttcgctggtgcggtgctgatgtatttcgctgcgcaacagaccacttttgccgggttcttcccgttactgctggcctactcactaacctatatgccgaccattgcgctgactaacagtatcgcttttgccaacgtgccggatgtggagcgtgatttcccgcgcattcgtgtgatgggcactatcggctggattgcctctggtctggcatgtggtttcttgccgcaaatgctggggtatgccgatatctcaccgacgaacatcccgctgctgattaccgccggaagttctgctctgcttggtgtgtttgcgtttttcctgccagacacgccacccaaaagcaccggcaaaatggatattaaagtcatgctcggcctggatgcgctgatcctgctgcgcgataaggacttcctcgtctttttcttctgttcattcctgtttgcgatgccactggcgttctattacatctttgccaacggttatctgaccgaagttggcatgaaaaacgccactggctggatgacgctcggccagttctctgaaatcttctttatgctggcattgccgtttttcactaaacgctttggtatcaaaaaggtattgttgcttggtctggtcaccgctgcgatccgctatggcttctttatttacggtagtgcggatgaatatttcacctacgcgttactgttcctcggtattttgctgcacggcgtaagttacgatttttactacgttaccgcttacatctatgtcgataaaaaagctcccgtgcatatgcgtaccgccgcgcaggggctgatcacgctctgctgccagggcttcggcagtttgctcggctatcgtcttggcggtgtgatgatggaaaagatgttcgcttatcaggaaccggtaaacggactgactttcaactgggccgggatgtggactttcggcgcggtgatgattgccattatcgccgtgctgttcatgatttttttccgcgaatccgacaacgaaattacggctatcaaggtcgatgatcgcgatattgcgttgacacaaggggaagttaaatgaaaacagaacgtattctcggtgctctttatgggcaggcgttaggggatgcgatggggatgccctccgagctttggccgcgcagtcgcgtcaaagcacactttggctggattgaccgttttctgcctgggccaaaggagaataacgcagcctgttattttaaccgcgccgaattcaccgacgatacctcgatggcgctgtgtctggcggatgcgttactggaacgtgaaggcaagatcgatccggatctgattgggcgtaatattctcgactgggcgctgcgtttcgacgcctttaacaaaaacgtactaggtccgacctcgaagattgcacttaacgccattcgcgacggtaaacccgttgctgaactggaaaataacggcgtgaccaacggcgcagcgatgcgcgtctcgccattaggttgtttgcttccggcgcgcgatattgactcttttattgatgatgtggcgctggcctccagcccgacccataaatccgatctggcggttgcgggggcggtagtcatcgcatgggcgatttctcgtgccattgacggagaaagctggtcagcgattgttgattcactgccttcaattgcgcgacatgctcaacaaaaacgcatcactaccttcagcgcctcactggcagcacgtctggagattgcgctgaaaattgtgcgcaatgctgacggcaccgaatccgccagcgaacagctttaccaggtcgttggcgcaggtaccagtactattgagtccgttccgtgcgccattgcgctggttgaactggcacaaaccgacccgaaccgttgcgccgtcctgtgcgctaaccttggcggcgacacagacaccatcggtgctatggcgacggcaatttgcggcgcgttgcatggcgttaacgctatcgatcctgcgttaaaggcggaactggatgcagtaaatcagcttgatttcaaccgctatgccacggcgctggcgaagtatcgccaacaacgggaggcgatatgagcggcgctcgattacacacgctgctgcctgaattagccacgcgtcagccggtgatggtcgtcggcgcggcggtcattgatgtgatcgccgacgcttatgccctcccctggcgtgggtgcgatatcgaactgaaacagcagagcgttaacgttggcggctgcgccctgaatattgccgtggcattaaagcgcctcggcatcgaagcgggtaatgccttgccgctcggtcagggggtgtgggcggagattattcgcaaccgcatggcaaaagaggacttaatcagcctgatcgataacgccgaaggtgataacggctggtgtctggcgctggttgagccggatggcgaacgcacttttatgtcattcagcggtgtggaaaatcaatggaatcgccagtggctggcgcgattaaccgttgcgcctggcagcctgctctatttttccggttatcaactggcctcgccctgcggcgaattgttagtggaatggctggaaaagctacaagacgtgacgccgtttatcgattttggcccacgtattggcgatatcccggatgcattactggcgcggatcatggcctgtcgacctttagtgtcactcaatcgtcaagaggctgagattgccgccgaacgttttgctttatccgcagagataacaacacttggcaagcaatggcaggagaaatttgccgcgccgttgatcgttcgcctcgataaagaaggcgtatggtatttcagcaacgacgcttctggctgcattccggcatttccaacgcaagttgtagacaccattggggcgggcgacagtcatgccggcggcgtacttgccgggctggcctctggtctgccactggcggatgccgtattactgggcaatgcagtggcgtcgtgggttgtcgggcatcggggcggtgattgtgcgccaacgcgcgaggaactactcctcgcacacaaaaacgtatagatcgctgcgacagtggctgatgctgtactcaataggccgttgctgttggtcaagcgccacttgcttgatcaccagcaccggtattttgctatctaactgaatatgtgactgaaactcggcatccggcatccgggcgctaacgcgggaacgcgtacgttgtgggtaaatgtgctggctgcggaagtagtcataaagagaaatcccgatggcatcaacatcatgaattaaatgtgccggaacccacgattcctcaatcgataccgcctcttcatcgacatagcgaatacgcttaagcaaaaagacatcacttcccgcttcgaccgccagctgctgcgcgacttcttcgggacatttcacgacacgcttgttaacccataacgtatcgggctttttcccgcgcaataccacctgctgagaaaacccccgcgcttctttcagcgagtattcgaagatgttgttgatctgcgtgccgtaaccacgcgaacgcgtcaccacgccctcttcttccagcgcctgcatcgccttgcgcaccgtaatgcgcgaaacgccggttaactgacttaaatcacgctcaccgggcaaaatattgccatgctccagcaccccgctgcgcacggcattttttaccgtttcggcaaacttaatataaagcggcgtgttatccgccgctaaaatacgctcgttcagttgggcaatcagctgggtatgcgcttgttccatttgtctttttcctgccggggaatctggtgggagtatatcactgcttcatatttaaggcgtttctttaatcccatcaacgaatccctgcaactcctccaccgtgccattaaacacattaaaatccaccggaccattaatgccatcgacctgtccacggtcggaatgctgccagaagcgccaggccatgccgtcattgtccggacgacgttgatagtagtgagccacccaccacggatattcattgaaatagcccgccagattcgtgtgataaaaaacggctcctgagtaaataattggcttttttcccgtacgtttttcgaccatttttagccactgacttacccgcttgcgtaattcttttgccgataattttccccgttcttctacgtccagtaccgcagggaaatcgccttgtgagaaatccaccgtttgcagaaataatcgcgcctgaactgaagcggatactgacggggagaaataatgatacgccccgcgcagcaggccattttcgcggcttagttgccagttacgcgaaaaataggggtccaccagcttttcgccttccgtcgccttaataaaggcaaattgtaagcgaataccgttatcgcgcatttttgccacccgctgccagtcgatccgctcctgccagcgcgaaacatctattccgtgaatggtgtaactggcaggaatgcgaatagcgaaagatttaaccgggcgataaccgtagaagtgaatgtagtctttaatctgaattgctgtcgaatagaaaaaattcaccgtctgacgcggataaattgcaacgatggaaattagcccaagagcgcataataaaacggtgaatttttttcgactggtgattctcaactgcattggtttcatccctgaatgtcagcaccaaaggctgacaataaccaaagcagctatagtacggtgctcaccaccaggcgtggaagtggtgaaccggaccaataccgtgaccaacttccagcgtgtcggcctgggctaatgccgatgaaagccagctttttgcctcctgtacggtgtcagtccagtttgtatggcgcgggcgcagtgcagccaacgccgcagagagcgtacaaccagtgccgtgagtgtttttggtcataatgcgctgtgcggtaaaccgttgttcaccctcgcgggtaaacagccagtccgggctttgctcatcatcaagatgaccacctttcattagcactgcgccacagcccatcgccaacagcgagcgcccttgttccagcatttcctgttcggtgcgcgcgtgtggcgcgtcgagcaaggcggctgcttcgggcaagtttggcgttattaatgaaacctgtggcaataatcgactgcacagcgtagcaaccgccgaaggtgaaagcagcgggtcgccgctttttgccagcataacggtgtcgagtaccacgttttggatctgataacgttgcaaccgttctgccaccgcttcaacaatatcggtttccgccaacataccgattttagtggtgtcgattcgcacatcgctgaacaccgaatcgagctgggcggcgacaaaatcaggctcaatgcgatacaccgactgtacgccacgggtattttgcgccactagtgcagtaataactgagcaaccataagcgccaagtgccgagaaggttttaagatcggcctgaatccccgcaccaccactcggatcagtaccggcaatcgtcagagcgttaattcgtttcatgcctgcacctcctgcgccaattgccagagcgcatcaaggaaatgtggaacaaaactgcctggcccctcgcttctggcaactgcgcgttctccggcttgtttcatccagtgacaggcagatgcgatattttccagcgtatcgcctggtagcgcacaacaggcagcgacaaccgccgatagtgcacagccagttcctaccactttggtcattaacggatcgccaccgtgaatgccaatgatacgatgtccatcggtaacataatccacctcgccagtgaccacgacgattgcgccagtttcccgtgccagtgtttgtgcagcgggtatcgcgttagctgcggcatcagtggtatccactccccgtccaccattagcaacgccagctaatgccatgatttccgaagcattaccacgtatggcggttggcttatgggacagaagttccacacaaaaacggcggcgataatcgagcgcaccaaccgcaaccggatcaagcgtccagggcgtttgtgatcgtgttgcttgctcaacggcagcactcatcgcttgcgctcgtggctgcgtcagcgtgccaacgttaatcaacaaggcactggcgatagccgcaaactgactggcctcttcggtttcgataaccatcgctggcgatgcgccgagcgccagcaaggtattggcagtaaaagtttgcaccacatcgttggtcatgcagtgcacaagaggggaatgttggtgaaaaaggtgtaacgcgtgcgcagattgcgctgaactcagcaggtcgacttgcatagtttgctcctgccataacgtgaagaagcaatgacctggtggtccgtgacttccctacgctggcattatccagatcaggtgatacgggtatttctcagccttcacaaagaagggcaccccgagtcgtttggttgcgataataaatcgcagaggaggatggtaatgtccagcgcacgcgttgtaaacggggaaaaacggcagttttacaatcgcgttaataaattatttgatataagaatccagcaccttcagaacgacatccagatcttcttctcgttttagctcatccccctggtgaacgatgtgttccgtcagatgacctttaatcacttcccgcatcagaccgtttaccgcgccacggatagcagcaatctgttgtaaaactgcagcgcattcatgcggttcgtcgagcattttcttgagcgccacgacctggccctgaatcttactggcacgcgctttcagtttctgtttatcacggattgtatgagacatggcaacacctggttaacaagaatatgaaaaatcatagcactattaatctactggggggtagtatcaggtactgggggggagtagaatcagattgccgaattaatactaagaattattatcatgaccgaatttacaacacttcttcagcaaggaaacgcctggttcttcatccccagcgccatcttacttggtgcgcttcatggcctggaaccggggcactcaaaaacgatgatggcggcgtttatcatcgccatcaaaggcaccattaaacaggcggtgatgctcggactggcagcaactatttcgcataccgcagtggtctggttaattgcctttggcgggatggtgatcagcaaacgctttactgctcaatcagcagaaccgtggctccagttgatttccgcagtgatcattattagcaccgcgttctggatgttctggcgtacctggcgcggcgaacgcaactggctggagaatatgcacgaacatgatcatgagcatcatcaccacgatcacgaagatcaccacgaccatggacatcatcaccatcacgaacatggcgagtatcaggatgcccatgcacgagcccatgccaatgacattaaacgacgctttgatggtagagaggtcaccaactggcaaattttgctatttggcttaaccggtggccttatcccctgcccggcagcaattaccgtgctgttgatttgcattcagttgaaagccctgacactgggcgcaacactggtcgtcagtttcagcctcggcctggcgttaacgcttgtcaccgtaggcgttggcgcagcaatcagcgttcagcaggtcgcaaaacgctggagcggatttaacactctcgctaaacgcgctccctatttttccagtctgttgattggcttagttggtgtgtatatgggcgtacatggcttcatgggcataatgcgataactcaatcctttaggcttgcatgttatcttcagcccaggatgattcttaaatcagctatttccgctgactctctgctcgctaaggatgcttttagggcatcctttcatttacactttttacgaaatcatgggatcactaacaaaatatcgcttgtcagttatattgtatggcaggaaagatatgcgactgatattacagatccccaaagtggagagtttatgaccattaaaaataagatgttgctgggtgcgcttttgctggttaccagtgccgcctgggccgcaccagccaccgcgggttcgaccaatacctcgggaatttctaagtatgagttaagcagtttcattgctgactttaagcatttcaaaccaggtgacaccgtcccagagatgtaccgcaccgatgagtacaacattaagcagtggcagttacgtaacctgcccgcgcctgatgccgggacgcactggacctatatgggtggcgcgtacgtgttgatcagcgacaccgacggtaaaatcattaaagcctacgacggtgagattttttatcatcgctaaaaaaaagccccctcggagagaggggggaatgcagacaccttaatatttttattattagccacttgctcgtcttgcttgttattagtcgtatttcacgttgattaatgcggttgcctccagtgcgccagatttaactttgtttgtatcgtagacgtagtaactggccgttatcggaattgaaaccgttgtatctgtaagttttgactttgccgcaatttcttttaaatttgtatatcctttactgctgttagtgatatttaaaagtgtgactggcgtaccattactttcaagaataaatcctacgccattatcttccgcacctttcaggatcgtgttgctgttggttaacaagtcagaacttgataaatacacctgcattttccgtgatgtttgattttgttgacctaataaatttttacaacgcagcataatatccccttttttactatttattgttgttttgttacctatggctggtaattgtgaaacgggaatactctctaacgtaattaataaatcgtccggtttgcaggttgtggttatcgggttgtatgacaatgtcagattaaaggaatagacacctgcattttgtgccaatgcatttctgtagctatttacacatgcatcccatgacttaccacctaataaacacagtagaaattgtactgcggcactcccgcgtgtcgatgatgaagcactggataatgtcgcaactccattaatcatcactgaaccaccgccccccgcagaaacattcacttttgcattactggccgcaggtgtcaccgtcaccgaataaccactggtgaaactggtctgattatttgacaacgtaatgttgtttttattggtccattcaaaatgtaaatttaatttaatggtatcgttataaagtccaacaataatatccgacgggctcataggtgtgatagtatttgtactcacgcatgacgaatcattaaaattatgctcatatgtcgccatttgtgtttgagtaagtgcaaaacccccctgaacaaccaaattgtgctgaacagataactcactataacatgccgcatagctcacaggcataaccatcatcattactataaatagcattatgcgaatttccatagaaccacctgactattactggcaaatataatttctactttcatcaatctctttaccgaaggtgattgtgcatgaaagcccttgttgcttatcaattgccacattaaccgatggcggtacttcattggtgcgaataaataactggcttccctggccgacaacaccaatattatgaccatggatatcattgacttcataaccaaacgttaatggttgcccatccgctcttaacgcttttataaaccatggcttgcgctgatcggtatcaaaattaaccagtacaaccgcgccgcgataaggggcggcaattttccggttgccacgtaattctgcttcgctatcgctttgtgacacatccaacatcaggtaattttcccgataaggtgtcattccgtcgtataccaccactccattacggtttgttgtgcgatatttttgcccattgacataagcatctttaattcctggcgcattcatcacagcaaacgtttcagaaagacggtttgccagattaacgccacccgaccaggcgacaatgccccctgaaacactggctccagcctgtcgataagcactcgactgactataactgccattcactgtcgcaaccggcgcgttccaggttaaattcgccccagctgtcgtttcatttccctgatactgataactcaggttgaccccatagttaaactgatcccggcttccaacggttcctgataatcccgtattatttgaggcaaccccctgatcatcaaacgtcgttgagttagacatatatatttgccgacgaggcgtcgtaacgtcatcaccccaatcaaagggaatcgatataaaaatattaaaacgtttctcttcatgatgattctcgtcataagcatggcttgccgcgagggtatagcttatccttcgcaggttgttggaataactcaactgataatccttactgctgccgctacgcccccagtaatctcgccataacgtacttaaggacacagaaccccagccttctggcaatgactgactcatattggcagaaaagctatttttacggccaaaatcgttctggtaataatcggcaatgtcatagatatcgttttcatcacggcgataattatctttattgtttgcccatacgtgatcattaaatgtccggtaatcacgcgacgaataacgccaggccgccagaccaaaacgtgtcgacgtttggctcacaaatttgttgtaggcaatttgataactttgcccgtcaaacacatcgccgttgtcttgtatactatgcgacttcgtggcatcgacggaaatggcaccaatgcgtgtattccagccagtccccaaagtgaacgcgtaataattattcgcgaccatcgatccgccatacagcgtcaataagttattaaaaccatactgataacccgcctgaacaaaatcactttgtttgctcgccccttcaatatggctacgacctgccgcaaaatcatatttcgacacgccgggttgcagcatattcggcactgctgcataaggcaccagataggtggttaccgaaccgtccgcctctttcacgctgacatcaagatctgctccacctccggccaactgcaaatctgtaatcgcaaacgggccaggaggaacctctttctgataaaccacaaaaccattctgttcaatagttaccagcgcgttactctgagcaatcccctgcacccgtggcgtaaaattttgtttcgagttaggcaacatctgcatatcacgaaacaaccgcacaccgctgaagcgaacagaatcaaaaatatcgcttgatgtgtacatatcacccacacgaagcgtgccgagaagttgggcaaatccacgttccagatacagggtattgcttttccacacccctggattgttatttgttttactgaaactggcatcagaatgcagttgccacccctgtaaatttaacccgctgttaaaacgtacatatgtactcttgctattaccggacgctttataatcgctgtaatactgactcacataataagaggtataaaacgcattaataccccgctcccagttttctggtggaacatagccactttccagatcttccacccaggcctgcgggacactgaaatcgagacgaaaaactccgatatcccaggtatagctcccgccctgaataagttgcttaaatgttaaacattgcttaccgctggcaaagctatcggtattaatgcctaaccgcttgatcatttcccttgataaacatgtttcttgcgggttgtctttaacaatgatctcatatttcccacgccattgcttattgacataaatatcgatgtcatacggccccggcaagggctgattatcttcaagacgaatatttgaaacctgctggtctttcattccacctatcatgaaatgggtatcaaaggtttcttcagctgcataagcttcaatgccgatcaataacgctacgattgctgatgcaagtggggtcattctcaacataggcagctcctgcaattaaattttgtcactaatataattgccatggtcatcgataatggtcagatgccagttatttgcattattacttttgacattaacactctgactttctaagggggcaatcataatagtttcataattgactttgacattattagctttgacatccgaaatcgtcacccaattagctgagtcattttttatcaccaatccattgccactgcgatttaccagtaactttttaaaggtcactttatttaccggagcaatacccgctggtcggtaaaacaacttaattctgttttgcatcgcaaacttcagtgcattcttaccttcttgttctggactatttggtggaatatccagaacattcagataaaaaatactctctttattagtgggtagtttattcggcataattttaatttttacttgctgcccggaatttgcccctatttttgccactggtggcgttaacatgaaaggaacctgaattttttctggtggtaatgacgtatcgccatcatcaatccacgcctgcatcagcgaagaacggtttccctggttcatcaactgcaccatcacttctttgtgctctgccgggtaaataatacgcgtcccgtagataacaataccggcatgtgcaggaaggaccatagaagaaatgagtaaagctaataatcctttcatcttaatgcctcttaaattaaaaggccgccatggagatagcggccatgttaattagctgaagaatcttgcaattttatttattaatcctgcgccacacgcataatcagggaagataacacatcacctgaattcactgagttatctgtcagtttcaggtattttgctttaaacggaatggcatattgaccgtccgctgttttataactctcgatgttgaaaggtgcagaaacatccaggacatcgctgttatcacctaaatagagataataacccacggtatcgttgctactggctatcgccttatcgtttccggttattttatcgttggtaatcaacgagagttttacaccagcaacttctttcggacagctaatttttaacatgctgctggttacaccgactgcaccatcataggtcgagtatttagctttaccttcaaagaccgtagttggtacagttggcatattaatacttactgaatcgccacctgcttcgaatttacacggagattctgcaatattccctttaatggttaatgttccggtatcaacgtctgcggcaaataccccagcgctcataaaaaaagaagaaaaaacagcggcagcaataattgaacgtttcataatatgctccttaataaaatctatttttggttgttaagagtctgtatctcttggaaacaaatttctcacaccaaaaaagttgccgcaatgtaaacacattgttttattgatttaaagcaaattaactattgcaatataaacacaacaaatacttaagcacattaaatatttatcaaatctattaattaatgtggatttctataaatggtattattaatatcaataaaataaacaaaaaagcttaaatcattcatgtaaatgatttaagctttctaaatctgattaaaaccagggtggcaaattaatcgtagcgatttaacacgattcgacgtttgctatcgctatctgcagcaatcacttccgtcgttacacctttaactggcgaagaaacctgatgacgggtatcaacattatacgttaactgaccacaatgctgttgaggttgaccattaaccatagccatactgcatgtcgggggactgatcctaccattaatcgttaatgtggcagtttctgaagagaacgcgggagaagccaatccataggcaagaaaaataattcctgacagccagtacttattcattgaacgttatccctgtagtaaaggttatgcctggaaagaatgagtgcataacaaactatagctgtacatccactacacagccacgaaggatgataatgaagcatcgccggtacgatcaatcgactttgtagagtttcggacgaaggtccgcagaatattcgcagcattaaataagtgttcattaatgcggcaaaaacaaatacaccgcatcaatgtaacatctctgcggtgtatgaagaataatcagaatggttaatacgcgttagaccgcgcggaaggaaatctcgcctggaatgacttcaccctgccagtagagctgagctgcaacgcggtcagccagctggcggtagatagcggtaaattcgctctcaggacggctgataaccgttggcgtgcctttatcgagatcctcacgtaaggagatgtgtaacggcatctgccccagcagctgcgtgtggtatttctcggccagtttctctgcaccaccggtaccgaaaatcggttcatggtgaccacagttactgcaaatatgcacactcatgttctcgacaataccgagcaccggaacctcgactttctcgaacatcacaatgccttttttcgcatcgatcaacgcgatgtcctgcggggtggtgaccacgactgcaccggttagtggaatgttttgtgccaatgtcaattgaatgtcaccggtacctggcggcatatcaagcaccagatagtcgagatccggccacaaggtttcctgcaacatttgcattaacgccttgctcgccattgggccacgccacaccatcgcattgtcgtctgtcaccagataaccaattgaattagttgccaggccatgagacataatcggtgccatatgggtaccgtccggcgaagttggacgctgattttctgcgcccagcatggtagggattgatgggccgtagatatcggcgtccagaatgccgactttcgccccttccgccgccagtgccaacgccaggtttaccgccgtggaggatttacccacgccacctttaccggaactgaccgcgataatgttcttcacgccgttaattcccggctgattcttcacgcgtttcagagtggctatgttatgcgacagtttccagtcgatagctttcgctccggtgatgcgcagcagttcggcgctacattgctcttttaactcttcgaacgcgctatgccagacgaatggcataaccagttccacatgcagcgtgtcgtccatccaggcgacatggtgcaacgctttcagcgttgtgaggttatgcttcagggttgggtgctgaaaattggccagtgtcccggcgaccattgcgcgcaaggcttctggtgatttggcctgggattgttcgttcatcccgactccttttttgtatagataaaccatcagctgatagtttacctgaagaatatagagaagtacttacttaacattttcccatttggtactatctaagcccttttcactattaagaagtaatgcctactatgactcaagtcgcgaagaaaattctggtgacgtgcgcactgccgtacgctaacggctcaatccacctcggccatatgctggagcacatccaggctgatgtctgggtccgttaccagcgaatgcgcggccacgaggtcaacttcatctgcgccgacgatgcccacggcacgccgatcatgcttaaagctcagcagcttggtatcaccccggagcagatgattggcgaaatgagtcaggaacatcagactgatttcgcaggctttaacatcagctatgacaactatcactcgacgcacagcgaagagaatcgccagttgtcagaacttatctactctcgtctgaaagaaaacggttttattaaaaaccgcaccatctctcagctgtacgatccggaaaaaggcatgttcctgccggaccgttttgtaaaaggcacctgcccgaaatgtaaatccccggatcaatacggcgataactgcgaagtctgcggcgcgacctacagcccgactgaactgatcgagccgaaatcggtggtttctggtgctaccccggtaatgcgtgattctgaacacttcttctttgatctgccctctttcagcgaaatgctgcaggcatggacccgcagcggtgcgttgcaggagcaggtggcaaataaaatgcaggagtggtttgaatctggcctgcaacagtgggatatctcccgcgacgcgccttatttcggttttgaaattccgaacgcgccgggcaaatatttctatgtctggctggacgcaccgattggctatatgggctctttcaagaatctgtgtgacaagcgcggcgacagcgtaagcttcgataaatactggaagaaagattccactgccgagctgtatcacttcatcggtaaagatatcgtttacttccacagcctgttctggcctgccatgctggaaggcagcaacttccgcaagccgaccaacctgtttgttcacggctatgtgacggtgaacggcgcgaaaatgtccaagtctcgcggcacctttattaaagccagcacctggctgaatcattttgacgccgacagcctgcgctactactacaccgccaaactgtcttcgcgcattgatgatatcgatctcaacctggaagatttcgttcagcgcgtgaatgccgatatcgtgaacaaagtggttaacctggcgtcccgtaacgctggctttatcaataagcgttttgacggtgtgctggcaagcgagctggctgacccgcagttgtacaaaaccttcactgatgccgctgaagtgattggtgaagcgtgggaaagccgcgaatttggtaaagctatccgtgaaatcatggcgctggctgacctggctaaccgctatgtcgatgaacaggctccgtgggtggtggcgaagcaggaaggtcgcgatgccgatctgcaggcgatttgctcaatgggcatcaacctgttccgcgtgctgatgacttacctgaaaccggtactgccgaaactgaccgagcgcgcagaagcattcctcaatacagaactgacctgggatggtatccagcaaccgctgttgggccataaagtgaatccattcaaggcgctgtataaccgcatcgatatgaaacaggttgaagcactggtggaagcatccaaagaggaagtaaaagccacagccgcaccggtaactggcccactggctgacgacccgattcaggaaaccatcacctttgacgacttcgccaaagttgacctgcgcgtggcgctgattgaaaacgcagagtttgttgaaggttctgacaaactgctgcgcctgacgctggatctcggcggtgaaaaacgcaatgtcttctccggcattcgttctgcttacccggatccgcaagcactaattggtcgtcacaccattatggtggctaacctggcaccacgtaaaatgcgcttcggtatctccgaaggcatggtaatggctgctggtcctggtgggaaagatatcttcctgctaagcccggatgccggtgctaaaccgggtcatcaggtgaaataatcccccttcaaggcgctgcatcgacagcgccttttctttataaattcctaaagttgttctcttgcgattttgtctctctctaacccgcataaatactggtagcatctgcattcaactggataaaattacagggatgcagaatgagacactttatctatcaggacgaaaaatcacataaattctgggcggtggagcaacagggaaacgagttgcatatcagttggggaaaagttggtacccaagggcaaagccaggtaaaaagttttgctgatgctgtggcagcggaaaaagcggagctgaagctgattgcggagaaggtgaagaagggatatgtggagcaagcgaaggataattctttgcaaccttcccaaacggtaacggactctctcaaggtagcggacttatccaccattattcaggaacaaccctctttcgtagcagaaacccgtgcggctgacaaaaatacagatgctgttttaccgtggctggcgaaagatattgctgtcgtttttccgcccgaagttgtacacaccacgttaagtcatcgccgctttcccggagttcctgttcagcaagcagacaaattgacccaattacgtcgcttagcctgtagtgtgtcgcaacgggataatacaacagccacatttgacttcagcgcctgttctttagaatggcaaaacaccgtcgcccaggcgatcagtcagatcgacgacctgaaaacaacacagctaccatcacccgtaatggctgtactcacggcacttgaaatgaaatgcacaagatataaagagcgtgaggatgttatggatcagattattcaggaaggcggtctggaatatgctactgatgtaataatacatcttcaacaaatatctattgaatgggattatgtcaacaataatattgttttcctgtcgtctggcatttcacctgattatttgcagcaatattccagctttgaattacgcctacgtaaacatttatcactggcggaagagtctctctggcaaaaatgtgcacaaaaacttattgccgcagttccacatattccagaatggcggcaaccattaattgctttgttattgcccgaaaaaccagaaattgcacatgaaattgcccagcgtctactggggcaaaagaaattaccctcgctggagtggctaaaaatagtggcgactgatgagcacattcttgcctcattagaaaaatatcacgagccatatgccatttttgatgattactattgtggtgcgatatggtcagccaccgtattacaggagcaaggtgttgcggccctgccccgatttgctccctatgtcgcaagtgactactgcgccgatgtgttgcgtcatatcaatcatccgttcgcattaacactgcttatacgtgtagcagggcatactaaacgctgtcacgatcgaatgacgaaagcctgcgctgcgttcccacacgcagcactggcagcactggcggaacttctagtgcaaaaagaagagaatagttggcgcattatgctaatgacgatgcttatctcgcaaccgacactagcagaacaggtcattccctggctttcgacacccgcagttgcagtgctgaaatcatgccagcaacaactgacacagccctcaaaccatgccagcgccgatctactgccggccatagtagtctccccaccatggctttcgaaaaagaaaaaatcgccgattccggtgctggatttagcaccgctcaacctcgaatccatatgcacaataaccgacacagaagctaaagagtttcaaactcattgggactgggaaccgcataagccaggtgaaggtgctaaaaatttcctttactcgctggggtatcgccgctgggattttgacacatataaatatatcggcgcttctgactcggcaattgacgcatgggaacgtgaggacttcgctacactcatccaaatgtttaaagcccaccatgcaccgtatcagggggagtggcatctcaactcacttccctttttacctatgcaaaaagcgattaagctatgggaatttctcagcaaagagccgcataccgcgataaaaccagtcatgctttatttgcgactggcaggtatgagtggttttctacactcgttttcacgctaccctcaagaaggttttgcggttgctaattattttgccgcaacggaactggctcctgccgtcgcccgcgccttcaacaaactcaaaacattacgacaagacgccagtagctggctgctgaaatacccggaacacgccattaccggcctgctgcctgcagcgctcggcaaagccagtgaagcacaggacaacgcccgtgctgccttgcgtatgcttaccgaaaacggtcatcagccattgctgcaagaaatcgcccggcgttataaccagccggaagtaaccgatgcggtgaacgctctacttgcgctcgatcccttagataatcacccgacaaaaatccccactcttccgaccttttatcagccatcgctctggacgcgcccgttattaaaagcaaacgcccaatcactgcctgatagcgcactcctccacctcggtgaaatgctccgcttccctcaggaagaggcactgtatccgggattattgcaggtgaaagatgcctgtaccaccgactcactggctgaatttgcctgggatctgtttaccgcctggcagaccgctggcgcgccgtcgaaagagagttgggcgttcactgcgttaggcgttctcggtaacgatgacaccgcccgcaaactgacgcctttgattcgcgcctggcctggtgaatcccagcataaacgcgccaccgtcgggttggatattctcgctgctatcggtagtgatatcgccctgatgcagcttaacggcatcgcccagaaactgaaattcaaagcattacaggagcgggcaaaagaaaaaattgccgacattgccgagagccgcgaactcacggtggcggagcttgaagatcggttagcaccggatctcggtctggatgataatggttcgttgttgctggatttcggcccacgccagttcaccgtcagctttgatgaaaccttaaaaccgtttgtgcgtgacgcttccggcagtcgtctgaaagacctgcccaaaccaaacaaaagcgatgatgaatcacaggcgaacgatgctgttaaccgctacaaattgctgaaaaaagatgcgcgtaccgtcgccgcccagcaggtagcaaggctggaatccgccatgtgcctgcgtcgccgctggtcaccggaaaactttcagctcttcctggttgagcatccgctggtccgccacttaacccgccgtctgatttggggcgtttatagcgccgaaaaccagctactggcttgctttcgcgtagcggaagataacagctacagcaccgctgacgatgatcttttcaccctgccggaaggcgatatctctattggtattcctcacgttctggaaatatcaccgacggatgctgccgccttcgggcagctttttgccgactacgaactgttaccaccgttccgccagcttgatcgtaacagttacgcgctgacagaagccgagcgcaacgccagcgaactgacacgctggacaggcagaaaatgcccgagtggtcgggtaatggggctggcgaataaaggctggataaagggcaccccgcaggatgctggctggatcggctggatgatcaaccccctgggccgctggtcgttaatcatggaaatcgatgaaggttttgcggtaggcatgtcgccagccgaactgagtgccgagcaactcttaagcaagctgtggctatgggaaggcaaagcggaaagctatggcagggggagtaattcaacacaggaagcgcagttctccgtactcgatgccatcaccgccagcgagctaattaacgatattgaagccctgtttgaataaggaaagagcatggacaaggaattaccgtggctggcggataacgcccaactggaacttaaatataaaaaaggcaaaacaccactcagccatcgcaattggccaggcgaaccggtgcctgttatcactgaaagcatcattcagacactgggtgatgaattgctacaaaaagcagagaagaaaaaaaacattgtctggcgttatgaaaacttttcactggagtggcagtccgccatcacgcaggccatcaacttgatcggcgaacacaaaccctcaatcacggcccggacaatggcggcgctagcctgtatcgcgcaaaatgatagccaacagttgctcgacgaaatcgtccaacaagaggggctggaatatgcaactgaggtggtgattgcacgccagtttattgtacggtgttatgagagtgatcctctggtagtaacattgcagtatcagaacgaggactatggctatggttatcgctcagaaacctataacgaattcgatctccgattacgtaagcatctctctctggcagaggaaacctgctggcagcgttgcgccgacaaactcattgccgcactgccaggaataaccaaagttcgccgcccttttattgctctgaacctcccggaaaaacccgaaatcgccaacgagctggtaagccttgaatgttcgcaaactcattttcgctcaaaagagtggttaaaagttgttgctgatgaccctaaggcggtgaaagaactcgcacgctactggagccaggatatatttagcgatcgagaagccagctacatgtcgcatgaaaaccacttcggttacgcggcctgcgctgcccttttgcgcgaacaaggactggcagccgttccgcgcctcgcgatgtatgcacataaagaagattgcggcagtctgctggtacaaattaaccatccgcaagtcatccgcaccttgctactggtggctgataaaaacaaacccagcctgcaacgtgtggctaaatacagtaaaaacttcccccatgcgacgctcgccgcactggcagaactgctggcgttaaaagccccccctgcgcgccctggttatcccatcatcgaagaccaaaagctgcctgcacagcaaaaagcacgtgatgaatactggcatacgctgttacaaacgctgatggcatcgcagccacaactggcagaagaggtgatgccgtggttaagtactcaagcccaggcagtggtgaatggttatttatcggcatcgccaaaacttgctttcgagagtactcatagcaacgacctgccagaaatacttgtttctccaccgtggcgaggtaagaaaaaaacggcattgctgcgccttgatttagtgcctcttgaattagcgcccaaagcccgctggcaaccaggcgaacgagagagacttgccgccacagagtctgcccgttatttcagcacgggatcttttacggaacgcatggaacgaaaaagtggtcgagttgtactacaggagctaggttttggggatgatgtatggctgttccggaattatatactgcccggcaaactggatgcggcgcgcaaatcattagtgggtcagtggcattactccccgcgcagagtagaggaaatcaacaatggctggcactccacggaagcaaaatcagccgaacaggcgcttcgttccggcgacgttgaagcgttaattaacacctgggaaaatgatagctactcacgttatcgtccggaaaagagtgtctggaacctgtatttattggcacagttgccgcgtgagatggctttgactttctggctgcgtatcaatgagaaaaagcatctgttcgcgggtgaggactattttctcagtatcctcgggttggatacattacctggcctgttattggctttttcacatcatccaaaagaaacatttccgttaattttaaatttcggcgcaacagaactggccctgcccgttgcccgcgtctggcgacgtttcgcggcgcagcgtgatctggctcgccagtggattttacaatggccggaacatacggctactgcacttatccctcttgtctttacaaaacccagcgataatagcgaagctgcattacttgccctgcgtttactgtatgaacaagggcatggcgaattactgcaaaccgtggcaaaccgctggcagcgtacagatgtatggcctgccctggagcaattacttaaactgggtccaatagaaatttacccggcacgtattccaaaagctcctgatttctggcatccggcaatgtggtccaggccgcgccttatcaagaataatcagcctgttaccgatgacgctctggaaattatcggcgaaatgctgcgctttacccagggcggacgtttttatggcggactggaacagctgaaaacgttttgccagccgcaaacgctggcagcttttgcctgggatcttttcaccgcgtggcaacaagctggagcccccgcaaaagacaactgggcatttctggcgttaagtctctttggtgacgaaagcacggctcgggatctgacgacacagatcctcgcctggccacaagaaggcaaatctgcccgtgctgtcagtggcctgaacatccttaccctgatgaataatgatatggcgctgatacagctgcaccatatatcccaacgggcgaaatcccgctccttacgtgataacgcggcggaatttcttcaggtggtcgcagaaaatcgcgggctaagccaggaagagttagcggacagattagtcccaacactgggtcttgatgatccgcaggcgttgatttttgattttggtccacggcaatttaccgttcgcttcgatgaaaacctcaacccggttatctacgatcaacaaaacgttcgccagaaaagcgttccccggttgcgcgccgatgacgatcaactgaaagcccccgaggcactggcccgactaaaagggctaaaaaaagatgcctctcaggtgagcaaaaacctgctcccgcgtcttgaaactgccctgcgcaccacccgacgctggtcgctggcagattttcattctctgtttgttaatcatccctttacccgcctggttacccagcgattaatatggggggtttatccggcaaatgaaccgcgtcgtttactcaacgcctttcgtgtggccgcagagggggagttctgcaatgcacaagatgagtccattgacctgcctgcagatgctctgattggcattgcccacccgttagaaatggcagcagaaatgcgcagtgaatttgcacagctttttgccgattacgaaattatgccgccttttcgccagttggcgcggcgcacggtgctgctcacacctgacgagtcagccagtaacagcctgactcgctgggaaggtaaatccgctaccgttggtcaacttatgggaatgcgatacaaaggctgggagtcaggctatgaggacgcatttgtctatgacttaggtgcgtaccggctggtccttaagttttcacccggctttaaccactacaatgttgatagcaaagcgctaatgagcttccgttctcttcgggtttaccgtgacaataaatccgtcacttttgccgaacttgatgtgtttgatttgagtgaagcgttaagcgcacccgacgttattttccattaaaacacagcgggcagtgatgcaactgcccgttatcaacacgacctaccagcgggggaagcgatgatcgtgcaaaaagagctggttgctatttacgattatgagatccctgtacctgaagagccgttttctttcagacttgaaatccataaatgctctgaattatttacaggttccgtctatcgactggagcgattccggctacatccaacatttcatcaacgtgatcgagaagatgccgaccactaataaatgatgcgttgatttatacaagagatgagtttattgatgagcggaaattacgaggtgaatcacatgaaactgtaatagcaatttttaattgtgaactacagaatatattcaaccaagaaatagaataatatactcatcatacttcaagtcgcagcatatgcaacttgaagtatggcgagtaaagctttattaaagggggaaacggtattcccccttagatgcgtttcaatttgcccgttacttcaacaaatcaatcaaccgtaacagagccactaatagctccagtacagcaatgagcacggttaacttttgtgtcagcgtgtccatccgctctccttattaaggagcgcaacaccagcaccttacccttacactgcctgtcgatactggtttacgtatgttggaccacgatgttgcactccggatcagggcaccacctacagcaccacccgtccggtagccaggacttgaaattggttcgatccggcgcaacctcccaacagtcaggattataaatctcattatcttaattgcaacggggtccagcggtggttataattcgttcgttggaacacgatgttgcacaggctgcggtgttaggcctgaaagtagtaaataaaagaacctgcctcaccagcaggtttttttattttttgcgatctgctttccagatattttccgctcaaacaactaatgcgccaaacagttattgcgcgtaaaatatcgtttatttcattaatacatttcagggatgaatatatgtcaccgcagaataatcacctgcagcgtccgcctgctgctgtgttatacgccgttgaactggcaaaattaaaacaaaatgataacgcaccttgcccgccaggttggcagttaagtttgcctgcggcccgtgcttttatccttggcgacgaagcgcaaaatattagccgtaaagtggtgattagtccctctgctgtcgaacgcatgttagtcactcttgccaccgggcgcggtttgatgttggtgggggaaccggggaccgcaaaatctctcctgtctgaattactggcaaccgctattagcggcgatgccaggttaaccatccagggcggcgcatctaccaccgaagatcaaatcaagtacggctggaactacgccctgcttatcaatcatggtccgtcaacggaagcgctggttcctgccccgctttaccagggaatgcgcgacggcaaaatcgtccgttttgaagagataacgcgtacaccgctggaagtgcaagactgtctgttaggtatgctttctgacagggtgatgacggtgccggaactcactggtgaagccagccagctctatgcacgggaaggctttaatattattgccactgccaatacgcgcgatcgcggcgtcaatgaaatgagtgccgcgctaaagcgtcgcttcgattttgaaactgtctttccgattatggatttcgcccaggagctggagcttgtcgccagtgcttcggcgcgtttgctggcccatagcggcattccgcataaagtgcctgacgcggtactggagttactggtccgcacctttcgcgatctgcgtgccaacggcgaaaagaaaacgtcaatggatacactaacagcgattatgtccaccgctgaagccgtgaacgtggcccacgcggtgggcgtccgcgcctggtttttagcgaatcgagcaggtgagccagccgatctggtggactgtattgccggaaccatcgtcaaagataacgaagaagatcgcgcgcgcctgcgccgttacttcgaacagcgtgtcgccacacataaagaagctcactggcaggcttattatcaagcccgccaccgcctgccgtgaggaaagatgcatgagcgagccgttaattgtcggcatccggcatcatagcccggcctgcgcccggctggtgaaatcgttaatcgaaagccagcggccacgatacgtattgattgaaggcccggctgattttaatgaccgggtagacgaactgtttttagcccaccagcttccggtagctatttacagttattgccagtatcaggacggtgcggcccccgggcgtggtgcctggacgccatttgctgaattttcgccggagtggcaggcgctacaagccgctcgtcgtattcaggcacaaacttacttcatcgatttgccttgctgggcgcagagtgaagaagaggacgattcgcctgatacgcaagaggaaagccagaccttgctgctgcgtgccacccgcatggataacagcgacaccctgtgggatcacttgttcgaagatgaaagccagcaaactgcattaccctctgcgctggcgcactattttgcacaactgcggggcgattcccccggagatgctctcaatcgtcagcgcgaagcctttatggcccgctggattggatgggcgatgcagcaaaataatggcgacgtgttagtcgtctgcggtggctggcacgctccggcactggcaaacatgtggcgcgaatgcccgcaggaaattaacaagccagaattgccctcgctggcagatgccgttactggttgttatctcacaccctacagtgaaaagcgccttgatgtgctggcaggatacctttccggaatgcctgccccagtctggcaaaactggtgctggcagtgtggcttacagcaggcaggtgaacaactgctgaaaacggttcttacccgtttgcgccagcacaaattgcccgcttctaccgctgatatggctgcagctcatctgcatgtgatggcactggcacagttgcgcggccatacactacctctacgcactgactggctggatgccatagctggctcgctgattaaagaagccctgaatgcgccgttgccatggagctaccgcggagttattcatcccgataccgatccgattctgctaacgttgatagacacattagcgggtgacggattcggtaaacttgccccctcgacgccacagccacctctgccaaaagatgtcacctgcgaactggaacgtaccggaatctctcttccggcggagcttaccttaaatcgctttacccccgatggactggcgcaaagtcaggtgttacatcggctggtaatactggagatcccaggggttgtgcgccagcagggaagtacactgacacttgcaggcaacggtgaagaacgctggaaattaacccgcccgcttagccaacatgcggcattaattgaggccgcctgctttggtgccacactccaggaagccgcacgccataaattagaagccgatatgctggacgcgggtggaatcggcagtatcaccacatgtcttagccaggcggcgttagcgggtctggcgtccttcagtcaacaattactggagcaacttacattattaatcgcccaggaaaatcagtttgccgaaatgggccaggcgctggaagtgctttacgccttgtggcagctcgatgaaatcagcggtatgcaaggcgcgcagatattacaaacgacgttatgcgcggctatcgatcgcacgctgtggctgtgtgaatctaacggcagaccggatgaaaaggagtttcacgctcacctgcatagctggcaagcgctttgccatatcctgcgcgatctacatagcggcgttaatttacccggcgtttctctttctgcggcggtagccttactggagcgacgcagtcaggcgattcatgccccggcgctggatcgcggcgcggctcttggcgcactaatgcgtctggaacatcccaacgccagtgccgaagcggcgctgacgatgctggcgcagttatccccggcacaatccggcgaggcgctgcacggtttgctggcgctggcccgccatcaactggcctgtcagccggcatttatcgccggtttcagtagtcatttaaatcaactgagtgacgacgattttattaacgccctgcccgatttacgcgcggcgatggcctggctaccaccacgagaacgcgggacgctggcgcatcaggtgcttgagcattaccagctcgcacagcttcccatttcagcgctgcaaatgccgttgcattgtccaccgcaagccattgcacatcatcaacaactcgaacagcaggcactggcatcgctgcaacactggggagttttccatgtctgaactgaacgatcttctgaccccccgtgagctacaacgctggcgattaattcttggcgaagcggcagaaacgacgctttgtgggctggatgacaacgcccggcagatagaccacgcgctggagtggctgtacgggcgcgatcctgaacggctccagcgtggtgaacgctccggtggattaggtggctcaaatctcaccacccctgagtggatcaacagcattcacacgctgtttccgcaacaggtgattgagcggctggaaagcgatgccgtgctgcgctacggcattgaagatgtggtgacgaatctcgacgtgctggaacgtatgcagccttcggaaagcctgctacgcgccgttttgcacaccaaacatctgatgaatcccgaagtactggctgccgcccgccagatagtgcgccaggttgttgaagaaattatggctcgactggcaaaggaagttcgtcaggctttttctggtgtccgcgatcgccgtcgccgctcatttattccactggcgcgaaactttgatttcaaaagtactctgcgcgccaacctgcaacactggcacccgcaacacggcaagttgtatatcgaatccccccgctttaacagccgcattaaacgccaaagcgaacaatggcaactggtcttactggttgatcaaagcggatcgatggtcgattcggtgatccactctgcggtgatggcggcctgtttatggcagttacccggtattcgtacccatctggtggcgtttgacaccagcgtggttgatctcacggcagacgttgctgatccggtagagttattaatgaaagtacaactgggcggcgggaccaatatcgccagtgccgtggagtatggtcggcaacttattgaacaacctgcaaaaagtgtcattattctcgtgagcgatttttatgaaggtgggtcatcatcattgctgacgcatcaggtgaaaaagtgtgtccagagcggcatcaaagtgctggggctggcagcgctcgacagcaccacaacgccttgctatgaccgcgatatggcccaggcgctggttaatgtcggcgcacaaatagccgcaatgacaccgggcgagctggcttcctggcttgcggagaatcttcagtcatgaattcactacgtccggaattattagaactgacaccacaggcactgacggcgttaagcaatgccggttttgttaagcgcagccttaaggaactggaaaatggcaacgtcccggaaatcagtcatgagaacggcgctttaatcgccaccttcagtgacggtgtccgtacccagctggcgaacggccaggcactgaaagaggctcagtgcacctgcggggccagcggcatgtgccgtcatcgcgtgatgctggtgttaagttatcaacgactttgtgccaccgcccagcctacggaaaaaaaagaagaagagtgggatccggcaatctggctgaaagaactggctaccttgcccgatgccacccgcaaacgcgcgcaggcgctggtcgctaaaggcatcaccattgagttgttctgtgcgcctgacgaaattccctctgcccgattaccgatgagcgatgtgcgtttttattcccgcagcagcattcgcttcgcacgctgtgattgcattgaaggcacactttgcgaacatgtcgtactggctgtgcaggccttcgtcgaggccaaaactcagcaagcggaatttactcatttaatctggcagatgcgcagtgaacacgtcacatcatctgatgatccgtttgccagcgaagaaggcaaaacgtgtcgtcaatatgttcagcaattaagccaggcattatggctgggcgggataagtcaaccgccaatccattacgaggccgctttcagtcgcgcgcaacaagcggcggaacgctgcaactggcgatgggtgagtgaatcgctacggcaattgcgcgccagtgttgatgccttccacgcccgtgccagccactaccatgccggagaatgcttacgtcagcttgcggcattaaacagtcgattaaattgcgtacaagagatggcgcgacgcgacagtatcggtgaagttcctcccatgccgtggcgcacggtcgttggcgctggtattgccggagaagcaaaacttgatcatctgcggctggtgtctttaggtatgcgttgctggcaggatattgagcagtatggtttacgcatctggtttaccgatcccgacacaggaagtattttgcatctttcgcgtagttggcagagaagcgaacaggaaaactcaccggcagcgacgcgtcggctgtttagttttcaggctggcgcactggccggtgggcaaattatttcacaagcagcaaaacgcagtgccgatggcgagctgctgttagctacccgcaaccgcttaagcagcgttgtgccgctgtcgcctgatgcctggcaaatgttgagcgcaccgttgcgccagccgggcattgtggctttgcgggaatatttacgccagcgtccccccgcctgcatacgaccaatcaaccaggtcgataacttatttattctgccgatagcggagtgtatttcgctcggttgggatagcagccgccagacgctggatgcgcaggtaatcagcggcgaaggggaagataatgtgctgacgttatcccttccggcatctgcctgttctccttttgccgttgaacgcatggcggcgcttttgcaacaaacagacgaccccgtgagtctggtttctggctttgtcagttttgtagaggggcaattgacactggaaccacgggtgatgatgacaaaaacccgcgcctgggcgctggacgcagaaactgcgcctgtggcaccgctaccttctgccagcgttctgcctgtgccgcctaccgctcatcagttgctgatgcgctgccaggcgttacttattcaactgctccataacggctggcgctatcaggaacagagtgctattggtgaggcagagttgctggcgaatgacctcaccgcggtgggtttttatcggctggcacatgtgttgggacaatttcgtaatacagaaagcgaggcacgggtagaagcaatgaataacggtgttttgctttgcgaacaattattccccatgcttcagcaacaaggatgaaatagtgctttttattaagagttctactcctgttccggactgctcacgccacagtattaggcatatcctatatagcccctggtgagagtcaccagttccttgattaaataaaatggagttttacatgaaggctttcaataagctgttttcccttgttgttgcatctgttctggttttctctcttgctggctgcggtgacaaagaagaatcaaagaaattcagcgccaatctgaacggcactgaaattgccattacctatgtctacaaaggtgacaaggtgcttaagcaatcttctgaaaccaaaattcaatttgcctccattggtgcaaccaccaaagaagatgccgccaggacacttgagccgttaagcgctaaatacaaaaacatcgcgggtgttgaagaaaaattaacctataccgatacctacgcgcaggaaaacgtgactattgatatggaaaaagtggattttaaagccctgcagggtatttcaggaatcaacgtttctgctgaagatgctaaaaaaggtatcactatggcgcaaatggaactggtgatgaaagccgctggttttaaagaagtgaaataatctgtcggcggccatgtttcgcatggccgccatacccgtcttagcttttcttcacatgctggcgcgctgccagtccacgcagaaaataacgtaaaaattgatcgccgcattcgcggaagtttttatgatccggtgcacgcatcatcgccgtaatttccggcatcgatacgcggaactgctgttcggtgaggattgccagaatgtcatcggttttaagcgaaaacgcgatgcgtaattttttcagcacgatgttgttattaatgcgacgttccggctccagtgccggagcagactcatccttgccgcgtttttcataaatcaggccattgaggaatgaagacaaaacaatgtccggacaacgctgaaaaccctcttcgtcttctttacgtagccagacggcgatctgttccgcggtggcttcgacattacccagcgccagaatacgcaccaggtcattattattggctttcaaaatgtagcgcacgctgcgcagaatatcgttacttagcatgaggccttcaggtgttgatgaggcaaaaagccattttagcagtcttttacaggccaatcgcctcttttaagcttttcagataacggcggctgaccggcacggttaagccattacgcaaaatcaactcggcctggccgttatcttccagacggatctcctgtaaatgcgcgaggttaaccagatactgacgatggcagcgcagtagtggggtacgactttccagggtacgtaatgtcagttcggtaaagccctctttcccttcgtgactggtaacgtagacaccgctcatccgactgctgacaaatgccacatctttcatttgcagcaaataaatccgactatgccccgtacaagggataaatttcagcgcctgttgattttccggtaacaacgaaacatcctgcttgctgcgctcctgacgcaatcgcgccagcgttttctccagtcgcgcttcatcaattggcttcagcagataatcaaaggcatgttcttcaaaggctttaatggcgtattcgtcaaacgcggtgagaaaaacaatatacgggcgatgttccgggtcgagcatccccaccatttccagaccactgatgcgcggcatctggatatcgagaaacagcacatccgggcgcagtttatgcaccgcgccgatcccttctacggcgtttgaacactctccaacgatttcaatatcgctctgctcctgcaaaaatacgcgcaggttctcccgtgctaacggttcatcatcgacaattaagactttaatcatgcctcgtccctccatggtagtcgtaacgttattcgggtgtaactatcaggctcacaggcgacgcttatcccatagtcatcgccaaaccgttcacgtaaacgcttatccaccagattcatccccagcccactggcattggttaccggttgatacaaaccggcattgtcttcgatctccagcatcaaatgttgcccctcacgtcgggcgctgattgccactcgccctgtatccagcagttgtgatgtcccatgtttaatggcgttttccactatcggttgcagggtaaacgcgggcaattgctgctgggataattcttgcggaatagcaatgttgacctgcaaccgcgactggaagcgcgccttttcaatttgcagataagcgttcacatgttcaatttcgtcggcgagagtaacaaactccgaaggccgctttaagtttttgcggaaaaaagtggaaagatactgcaccagctggctggcctgttcgctgtcgcggcggatcaccgctttaatggtgttaagcgcattaaacaaaaaatggggattcacctgggcgtgaagcagtttgatctctgactgggtgagcatcgctttttgccgctcatattgcccggcgaggatctgcgccgaaagcagttgcgcaatcccctcgcccaacgtgcggttgattgaactgaataaacggtttttggcttcatacaatttgatggtacccatcactcgctgattttcaccacgcaacggaatgaccagcgtcgaccccagtttgcattgcggatgcaaagagcaacggtaaggcacttcgttgccatcagcgtagaccacttcaccggtttcaatcgcttttaaggtataagtcgaagaaattggtttgccgggtaaatggtggtcgtcaccaattccggtaaaggccagcaatttctctcgatcggtaatcgcgactgcaccaatatccagctcctgatacagcacctgtgccactttcatgctgttcacttcgttaaacccctggcgcaaaatgccttccgtcgaggccgccactttcagcgcagtggcagaaaaagccgaagtgtatttttcaaacatcgcgcgtttatcgagcaatatacgcataaacaacgccgcgccgacggtattggtgaccatcattggcgcagcaatattactcaccagacgcaccgcatcttcataaggtcgggcgatcgccaggataatcaacatttgcaccatttcagcgacgaacgtgacggcaccggcggtaatggggttaaagactttatcagtgcgcccgcgacggatcaggatgctgtgtaccaggccaccgagcaatccttcaacgatggtcgagatcatgcaacttagcgcggtcatgccccccatcgaatatcgatgtaacccgccggtcagaccaaccagcccaccgacgaccggaccgccgagtaagccgcccattaccgcacctatcgcacgggtattggcaatagaatcgtcaatgtgcaacccaaaccaggtgcccatgatgcagaagatggaaaagacgatgtagcagagaaatttatgcggcagacgaaccgtgacctgcattaacggtatgaataatggcgttttactcattaaccacgcaatgactaaaaaaacgcacatctgctgaagcagcagcaacaccagattaaaatcgtacatacccgcaaaccacacttccctttaaaacgcgtaacatacattgcttgcgtttaactttctttgaactcttgcagaaaaatgagaattcgtgagtacgatcactcaaaatcgcctggcaaaaataaaatcaccctatagatgcataaaaaacgggcaaaactacctggttcgcaaaactgcgtctaaagttaaaccgggacctcgcgagcaagggtgagacgatggcgctttacacaattggtgaagtggcgttgctttgtgatattaaccctgtcacgttacgcgcgtggcagaggcgttacggattgctgaaaccgcaacggacagacggcggtcatcggctgttcaacgatgccgatattgaccggatccgcgagatcaaacgctggatcgacaacggcgtgcaggtcagcaaagtaaaaatgctgctcagtaatgaaaatgttgatgtgcagaacggctggcgcgatcagcaagaaacattactgacttacctgcaaagcggcaatctgcatagcctgcgaacgtggatcaaagagcgcggtcaggattaccccgcccagacactcaccacacatctgtttattcctctgcgccgacggcttcagtgccaacaaccgactctccaggcgctgctggcgatcctcgacggcgtactgatcaactacatctctatttgcctggcttcggcgcgcaaaaaacagggtaaagatgcactggtggttggctggaatattcaggataccactcgtctgtggctggagggctggattgccagtcaacaaggatggcgcattgatgtcctcgcccactcgctcaatcaactacgccctgaactgttcgaaggccgtacattgctggtatggtgcggtgataatcgaacctccgcccaacagcagcaactcaccagttggcaggaacaaggccatgatattttcccactcgacatttaatgattcgttaacaaatacgctttactgtacaatcctttcgttaacataaggagtgcattatgcgcatagctaaaattggggtcatcgccctgttcctgtttatggcgttaggcggaattggtggcgtcatgctcgcaggttatacctttattttgcgtgctggctgaacgcctgcaccagcctttcaaacaggcggtctgcgatgatcgccgccagtgccaccagtaacgctccctggatcacatacgcggtattaaatccgctaagcccgatgatgatcggcgtacccagcgtgttggcccctaccgttgaggcgatcgtcgccgtgccaatgttgataatcaccgaagttcgtacacccgccagaatcaccggagctgccagcggtagctcgaccttacgcagtcgctgaccacgactcattcccatacctttcgcaacttctgtcacgctggcatcaatcgctcccagcccggcaagtgtcgcctgcaggacgggcagcacgccgtaaaggatcaaggcgataatcgctggtttcagaccaaagccgatcaccggaacggcaatcgccagcaccgcgacgggcggaaaagtctgcccaacggcggcaatagtttccaccagtgggcgaaattccgcaccccacgggcgagtgacagcaattccggcaccagtaccaatgatcaccgcaaacaaactcgaaattcccaccagccagaaatgagccagtgccagagctgcaaagctttcctgctgataaacgggtcgtggcagttgtgggaacaaggcagcaaacagcggctggctgtaaggcagccagaaaatcagcgccacaaacagagcaatcagccagaacagctgatcgcgcaacatcttcatacgattacgcctcctccagcagatcctgaaaatgcagcgtgccgcaaggctcgccctgcgtgttcaccaccggcagcacttcacatccccgcgcgacaaacagggagagcgcatcgcgtagcgtcatctcttctgccagcgcctcaccttctgcccgttcttcgcgacgcacgtaatccgccacgctacgtaacgaaagcaggcggacacccagttcactatgcccaaaaaactggcggacaaaatcattcgccggatgagtcagcatcgccagaggattgccctgctgcacgacttcaccgtgatccatcaataccagatgttctgccagccgtagcgcctcatcaatatcatgagtgaccagcacaatagtgcgcccctgcaaacggtgaatgcgcgtcatctcttgttgcaacgcgccacgcgttaccgggtccagtgcgccgaatggctcatccatcagcaagacttgcggatcggcagccagcgcgcgggccactcccacacgttgctgctgaccgccggaaagctgatgcggataacgctcacgcaaatccggctccagccccagcagcgccattaattcgtcgatacgatcgtcgatccgcgcccgcgaccatttttgtaattgcggcacggtggcaatgttttgcgccacgctccagtggggaaacaggccaatagattgaatggcatagcccatccggcggcgcaactccagcactggcagcgagcgaatttcttctccggcaaagcggatcacgccactgtcatgctccaccaggcggttaatcattttcagagtggtggatttaccggagcctgatgtaccaatcagcaccgaaaaactcccctcctgaaaattgagattgagatcgttaacggctttttgtgtgccgaacagtttgctgacatggctaaattcaatcattacgtttcaccttcagcagtgcgataagcaaatcgaacagcgcgtcggtaagcaccgccagaacaattaccgggatcacccccagcaacactaaatcaatggcactgcttaacagcccctgaaaaaccagcgcaccaaaaccgcctgcgccgattaacgccgcaatcaccgccatgccaacggtttgcaccatcaccacccgcaggctgcgcagaaataccggtaacgccagcggtaactgaacatgcaggaaacgctgcgtcccgctcatccccatcgctctggcgctctccagcacatcgcgcgggatctggttcaagccgactactacgccgcgcaccagcggtaacagggcatagagcaccagtgcaatcagagcgggtgtcattccggttcctgctatgccgagcgttcccagccacggaaaggccgtaaccagcgcggcaagcggcgcaatcaacaggccaaagagcgctaccgaaggcacggtctgaatgacattcagcagagaaaaaatcgccccttgccgcgcggtggaaaagtagcaccagatgcccaacggcacaccaatcactaacgcaggcagcaccgcaccaaacagcaacgtcagatgttgtgccagcgcgtcgtcaaacacatcctgacggttggcgtattctttcattaacgagagatcgttaagcgtgccggagtacagcaaccacagcggaacaatggcaatctgcatatgcaacaaccagcgccacagcggatgcgtggagattcggcggatggcatcgctacaggccagcagtgccagcgccgcagccagccagaaaccacttccgaggcaggtacgcgccagcgcactaccattttgcgccagttgtgtcgccgcctttccagctccccacaccagcaatacgaagacgaattgcgccagaatgagtgcaaaaatgctgccttttttagcgggaataaaacaggctgtcagccaggcgcaaccaacgcccaccagcatccagagagtttgcggccacagctgccagagatgacgcccctcacccgaaactaaacgattaggtgcgtaactgataaacggcagcgccgctgcgattgccgtcagcaacagcagcagcgccagaacaggattaatacggaaataagtcacgggaaattacttcgtccaccctttttgtgtcaggtagtcggctgccacttttttggcatccagtccttccactgcaatgctggcattcagctgctgcaatgttttttcatcgaggctggcgaagactggctgtagccactgtgctatttgcggatactctttcagcaccgactcacgcaccactggcgcaggcgcgtagataggttgcacgccttgcggatcgcttaaggtttgcagccccagcgccgcaaccgggccatcggtgccgtaagccattgcggcattaacgccagaagtttgctgggcagcggctttgatcgtcaccgccgtgtcaccaccggccagtgacagcaactgatcctgaccgagcttaaagccataggctttttcaaacgcgggtaaggcatcggcgcgttcgataaactctgccgaggctgccagtttgaagttgccaccctctttcagataacgactcagctcggcaagcgaagtgagtttgtttttctctgccacatcctgacgcacggcgatggtccaggtgttatttgcaggcgcgggcgtcagccagattaacttgttttgctctgcatcgagttttttgactttctcatagccttgctgcgcgtttttccataccgtatcgttttcatctttaaagaaaaacgcgccattgccagtatattccggatagatatccagctcgccagaagtgatcgccccgcgcactacgggagtcgttcccagctgcactttatttaccgtaggaacgccgtgactttccagcacctgcaaaatgatattgccgagcagcgcgccttccgtatcgatttttgaaccaaccttaacgggggaagccgcctgtagcggcaggctcacggctgccaacaaaaccagtgaacctgcccagagctttgagagtggcatgatgctttcctcattcttttactgttgttttcagcgaattaagagaaaagcatagttgataatgacagggttagcctgtctggacggattcagttgcagaatcagataaatacttaaagggcatattttgcccggcgtttcttgccggatgcggcgtaaacgccttatccggcctacaaacatcgaaaattacaacaactcaaactcggctttcttaacgcgtgcggaatcagtgccgatgaagacattgaacttgccaggctcggcgtcatatttcatctgttgattccagaacttcagcgcctcaatatcgattgggaagctgacggtctgagtttcgcccggtttcagggtgattttctcaaagcctttaagctgcttcaccgggcgactcatggaagccgtcacatcctgcaagtacatctgtactaccgtggccccttcgcgtttaccggtgttcgtcacctgcacgctggccgtcactttgccgtcacgcttcatggtcggcgcagaaagtttcacatcagagacggtgaaagtggtgtagctcagaccatagccgaacggataaagcgccccgttagcttcatcaaaataacgcgaagtgtatttgttcggcttgtcggcattatacggacgcccggtattcagatggctgtagtacaccgggatctgcccgacagaacgcgggaaggacatcggcagcttgccagacgggttataatcgccaaacaatacatcggcaattgcattaccgccttcagtccccgcaaaccaggtttccagaatcgcatcagcctgctgatcttctttcaccagcgccagcggacgcccattcatcagcaccagcaccagcggtttaccggtggctttcagcgccgcaatcaagtcacgttggctttgcggaatagtgatatcggtacgactggaagcttcgtgcgccatcccctgagcttcaccgaccacagccaccaccacatcagattgtttcgcggtttgcaccgcttcatcaatcatctcttgcggcgaacgcggatcaactttgaccgcctcttcatactgattcaggaaatcgataatgcctttgtcactggtaacgttcgcccctttggcatacagcactttaccgttttcaccgacggcgtttttaatccctgttagcacagtaacagattgatcggcgacacctgccgccgaccagcttcccatcacgtcacgcttgctgtctgccagcgggccaaccaccgcaatggttgcagattttttcagcggcagcgtttcgagacgatttttcagcaacaccaggctttcgcgcgccacttcacgcgcttctttgcggtgcaggcggctttcggcattggtatccaccgggtcagactctttcggccccaaatggctgtatggatcgttaaacaatcccatatcatatttaacgttcagtacatggcgggcagcatcgtccagctcttccatcgtcactttgccggatttgatcaacccaggcagatacttcgagtaatactcgtcgctcatgctcatgttgattccggacttcagcgccacgcgtaccgcatcttccgggtctgccgccgtgccatgtttaatcagctctttgattgcaccgtgatcggaaacggtgatgcctttaaagccccactggtcgcgcaggacatctttcagcagccaggaatcggaggtggctggcgtgccgttcagcgagttcagcgccaccatcaccgcgccgctgcctgcgtccagccccgctttgtacggcggcatataatcattaaacaggcgctgcggactcatatcgacggtgttgtactctttaccgccttctaccgcgccgtaagcggcaaagtgtttgacgctggtcatcaccgagtagcgatctgccggacttttaccctgcatcgcttgcaccatggttttacccattattgaggtgagatacgtatcttcgccaaaaccttcggaagcacgtccccagcgcggatcgcgcgaaacatcgaccatcggtgcccaggtcatgttcaggccatcatctgccgcttcataagcagagacacgcccgactgttttcactgcatcgaggttaaaagacgaggccagaccgaggctaatcgggaacaccgtgcgctgaccgtgcagcacgtcgtaagcaaagaaaagaggaattttcaggcggcttaattccatcacctgatcctgcatggcgcggatatcctgacgggttacggtgttgaaaatcgcccctacctgcccgtctttgatcatctcgcggatcgcctctttcggattatccgggccgacgctgattaaacgcagctgaccaattttctcatcaactgtcattttcttaagcagttcggtgacgaacgcatcccgcgcttcgggcgttaatggatggttgccgaataaatcatccgccagtgctggctgcagggccagactcaccgcgattcctactgaacatagccatttcatatggatttttcttcctctgttgcccgacgaggcagcgaaaatggtgcaaaaaccgtagtttgccataagcatgatggagagagaaaaagaatgctcagtttattgtctgaattttcaaaatattcactcgctgaattgtcatacaaggcgctattctagtttgtgatattttttcgccaccacaaggagtggaaaatgtcttccatgacaacaactgataataaagcctttttgaatgaacttgcccgtctggtcggtcattcacacctgctcaccgatcccgcaaaaacggcccgctatcgcaagggcttccgttctggtcagggcgacgcgcttgctgtcgttttccctggctcactactagaattgtggcgggtgctgaaagcctgcgtcaccgctgacaaaattattctgatgcaggctgccaatacaggcctgaccgaaggatcgacgccaaacggtaacgattatgatcgcgatatcgtgatcatcagcaccctgcgtctcgacaagctgcacgttctcggcaagggcgaacaagtgctggcctatccgggcaccacgctctattcactggaaaaagccctcaaaccgctgggacgcgaaccgcactcagtgattggatcatcgtgtataggcgcatcggtcatcggcggtatttgtaacaactcgggcggctcgctggtgcaacgtggcccggcgtataccgaaatgtcattattcgcgcgtataaatgaagacggcaaactgacgctggtgaaccatctggggattgatctgggcgaaacgccggagcagatccttagcaagctggatgacgatcgcatcaaagatgacgatgtgcgtcacgatggtcgtcacgcccacgattatgactatgtccaccgcgttcgtgatattgaagccgacacgcccgcacgttataacgccgatccggatcggttatttgaatcttctggttgcgcaggtaagctggccgtctttgcggtacgtcttgataccttcgaagcggaaaaaaatcagcaggtgttttatatcggcaccaaccagccggaagtgctgaccgaaatccgccgtcatattctggctaatttcgaaaatctgccggttgccggggaatatatgcaccgggatatctacgatattgcggaaaaatacggcaaagacaccttcctgatgattgataagttaggcaccgacaagatgccgttcttctttaatctcaagggacgcaccgatgcgatgctggagaaagtgaaattcttccgtccgcattttaccgaccgtgcaatgcaaaaattcggtcacctgttccccagccatttaccgccgcgcatgaaaaactggcgcgataaatacgagcatcatctgctgttaaaaatggcgggcgatggcgtcggtgaagccaaatcgtggctagtggattatttcaaacaggccgagggcgatttctttgtctgtacgccggaggaaggcagcaaagcgtttttacaccgtttcgccgctgcgggcgcagcaattcgttatcaggctgtgcattccgatgaagtcgaagacattctggcgctggatatcgctctgcggcgtaacgacaccgaatggtatgagcatttaccgccggagatcgacagccagctggtgcacaagctctattatggccattttatgtgctatgtcttccatcaggattacatcgtgaaaaaaggcgtggatgtgcatgtgttgaaagaacagatgctggaactgctacagcagcgcggcgcgcaataccctgccgagcataacgtcggtcatttgtataaagcaccggaaacgttgcagaagttttatcgcgagaacgatccgaccaacagtatgaatccggggatcggtaaaaccagtaagcggaaaaactggcaggaagtggagtaataattacggatggcagagtatcgccatccgtcattcatttaatcgttctgtgccgtctgccccgccgccgccatttgggcggctttttgttttttatagctcaacgctgctgccggaacaggcatcactttaccggtttcaatccaggtacgcaggcggctggcatcggcaaaatgggtatatttgccaaacgcgtccatcactaccagcgccaccggtttattattgataaccgtgcgcatcgccagacaatggcccgccgcattggtaaaaccggttttggttaactgaatattccagttatcacgatacaccagatggttagtattgcggaacggcagcgtatacgtcgggttagagaaggttgccatatcttcccgggtagtacttaactgcccgatcaacggatattgtttgctggcaatgagtagtttggttaagtcacgggcggttgaaacgttatgcaccgacaatccagttggttcaacaaagcgcgtgttgttcattccgagcgatttcgctttcgcattcatcgccttaataaaggctttgtaaccaccgggataatggtgcgcaaggcttgccgccgcgcggttttctgaagacatcagcgccagcaacagcatatctttacggctgatttcgctgttcagtcgtacgcgcgaatagacccctttcatctccggcgtctggctgatatccacttttagtttttcatccagcggcagtcgtgcatccagcacaaccatcgcggtcattaatttgctgatagacgcaatcggacgcaccagatccgggtggttcgaatagatcactttgttggtattcagatcaacaatcatcgcgctaccggaggcaatttccggttgtgacgcggtggtagcggctgccgttttcgcaacggcctgcggtgcaaaaggcacagccagcatcagggccaggctaaataaagaaactcgaaatttcggcatgatgagcattcagatagtggttcacgcgcacgggttgcgcaccgccggagtaaggatttactgaggctagcgacgccatcataacgagcaaaaagtgcgatcgtcaaagaagaatcgtgaggaaatgctgcattgctgacatttacgccagcaatgcagcgcaaaagaactttctagaacaaacgataaccgtagccccatagtataacggtaagggcgagcagcacttccagcaccagcacgcctatcgccagtgtcgaactggagaagctaagtccttcctctttgttgatattcaggaagctcggaataccgagatacagcaggtagccggtgtaaaacagcgccaccgtgccgaccagcgcacacaaccagaccagcgggtaaagcgccaccagaccgcttaaaaacagcggagttgcaacgtagcccgcgaagaccatgcagtgcgcaagtgacggacgctgcggataattacgcgccatccaccagatgacccgccccatcaccgcaaccccagccagcataacgccgtaaaacaagacagccagcgccagtccggtaaaccaggataacttcaggatagtgccatcgccaaaattccagccaatctgtgtagtgccaatgaaggcgcaaatcaccggaatcgccgccatcagcaaaacgtggtgggtgtagtgatgagaaatcgtttcgttttcgcgattaatcacctgcatttcacgatcgggatgggaaaacagtccccagacatggctcataccgcccccttgttgtgagttcatgaacctgacagttcaagtataagtcagcttgtgattattttttgttcgctcatgtaatttgcaccgtctgatgtacgtcctttttcagcgtgaatgattcacagggtgtatgcttacagtcaagcaaagggagacagactgtcctatggatctcaatacactcatctcacaatatggttatgccgcgctggtgatcggtagcctggcggaaggtgaaaccgtgactttgctgggaggcgttgcggcacatcaggggctattaaagttcccgctggtggtactttctgtggcgcttggcggcatgattggcgaccaggtgctttatctgtgcgggcggcgctttggcggcaagctgttacgccgtttctcgaaacatcaggataaaattgagcgggcgcagaaacttatccaacgccatccgtatctgtttgtcattggtacgcgttttatgtatggctttcgggtgattggcccgacgctgattggtgccagccagctgccgccgaaaatctttctgccgctgaatattctcggcgcatttgcctgggcgctgatttttaccactatcggttacgctggtgggcaggtgattgcgccgtggttgcacaatctcgaccagcatttgaagcactgggtctggttgattctggtcgtggttctggtggtaggcgtgcgctggtggctgaaacggagcgggaagaaaaagccggatcatcaggcgtaaaactattgccctggataaggtgttcgcgccgcatccgacatccggtgcaccatgcctgatgcgacgctggcgtgtcttttctggcctaacccaatgaaataaccacgcacctcactgcgctattctgggttgaactgcggattcgccaacataaagccgccatccactatcaacgactgcccggtggtgtaatttgcgccctccgaacaaagccataccaccaggctggcaatctcatgcgttgtgccaaaacgtcgcaagggaatcgaaggctccgcgtcaggcttcacgtcgccgccatccatgccgttcattggcgtggcgatcgccccaggtgcgactgcgttcaccaaaattttatgcctgaccaactccagcgccattgctttggttaacccgccgagcgcatgtttagcggctgtgtaggcgctggcatccggcagcggcgtatgttcatgtaccgatgtaatgttgatgatgcgaccgccctgcccttgcttcaccatctggcgggcagcaatttgcgagcataaaaatgcaccatcgacatcaacggtaaaaatcttgcgccactaatcgaaagccatatcaagaaacggcgctttggtcattgcgcccgcattattcaccagcacatcaatacgccccagccgttgaataagtttctccagcgcctgcgcaccttctggtagattgccgagatccagttgcacgatctccgcacgtacgccgtggctaactacctcacgcgcggtatcttttgccccttcttcatctgagtgccaggtaatgccaatatcaaacccctgctgcgccagcaataacgcgcactctttgccgatccccgaatcggaggcggtaattatcgcgacctgtgccatcgagttctccacttaacgctcaacaaacgttaagtatagaaggcgcatatcatcagcgtttgtaccccccgcccagcgcaccagtgagttgaatggaggcatccagccactgcccttgcaataacaggccattggcccgctcacgcagcgccgggattctggcttcgctgacccgggaaccagcaatgaggcccgcgttaaagcgggcctgcgcaagacctactacacgcaaggcatcgcgctcaatttgcgcctgatgctggtttttctccgccagtgtctgaacctgactggctgcccgcgccacgtcattcaccgcttcaaccaccgctttgttgtagctggcgatagacaagttgctttcggcttttgcgatatcgaggttggcgttaagacgaccactatcgaaaatgggtagcgtcaggcctgccgtaacgcccatttgctgcgcggaatgacggaacagatcgcttaagtgcaacgcatcctgttgcaggaaggccatcaggttgatgtcaggataaaatgccgcttttgccgcatcaatagtgcttaacgatgactcaacgtaccagtgcgccgcctgcaaatctgcccgccgcgccagtaaggagtaccccagttcatcaggaagctggcttgccactttcggcaacgcgaccgttttaagcttcagtgactttgtctggtgatttgtgagtgcatttaaccgtgcctcaataattttcattttacccgcgacatcgttgagctgctgccgggttttgctggcattaatatcggtttccacaccttcaactgaagaagtaatcccgttctgatatagctggcgatcggtcgcgataatggtgttctgctctttttcgatttgctgcaagaccgtgtttaacgccgcctgggtttgccactcccagtacaggcgggctacgctgccagccagcaattggcgggtttgctcgcgttccgccgcccgtgctttaaccgtacccaggcgagcagtaatctccgcccgattctttccccagatatcgagatgccagcccgccgttaagccaaaagtaccgttggtgtaccacggaccggtcgtacctgcggccggatcgttcaaagcaaacggccccattaacccttctgccgacattttttgccgctccatatccgcagaaaagtcgagctgcggaccatcctgagtggcaactgccttcgcctgggcttcagccagctgaatgcgctgttcagccacctgcatatccggtgcgctctgtagtgcgttattaattaaggaagtgagttgattatcgtgatactccagccaccattggctgtctggccaaccatttttcagcgccgtgggtaatgcggtgtcaacttgtgccgcgggtgtttgctggcttaacgcctggcgggtttcatgcataggcgcacacccggccagcatcagtaacagcggaaaacaggcgatggctggataaaaagaatcacgattcatgggggaataatcaggtaagaaaaggtgcgcggagattaccgtgtgttgcgatatattttttagtttcgcgtggcaatacatcagtggcaataaaacgacatatccagaaaaatatacactaagcgaatgatatctcccgatttatcttaatcgtttatgaatagcggcaaagggcttcgttttttcctatacttattcagcactcacaaataaaggaacgccaatgaaaattatactctgggctgtattgattattttcctgattgggctactggtggtgactggcgtatttaagatgatattttaaaaatcagatatggcatataagttgtcaggtcagtaactcgatattttgtgtacttgatttgcaaacagctccggtgttggtggcgtcaaaatcgctgaagcgttccccgaaggccggggcagcccacatggatgtgggctgagggcgcgtcttacaaggacgttacctcgcgcccgacccggtagccgaaggggataagctgaaggtaccgcgcagcggcgattttgttcgccagagcccggggtgcagggggaggaggcgattgtcctccccctgcgcgctccttgcgccagtggcaatatgtggcttagctcatgaaaggagcgcaacaagatgatgaagctgaataagcgattcattgtctcagataagctgcgattccactattatcgcagcttatcgatatcaatggcctgaatagcccttgcaatatcaggggaattattcaacacccgaacatgctgaaataattccgttgcttcatcgtattctttacgcaaataactcaaccactgtttaatccgcgcaacgtgatataacccggtatcgccctgcttttccagacgggtatatttttgcagcaaagcaaccacctccggccacggcattcgcggttcgttatatttcaccacacggctcaggttgggaatattgagcgccccgcgaccaatcatcactgcgtcgcagccgctgatcgccatgcattgttgcgcactctgccagtcccagatttcaccgttggcaatcaccggaatattaagccgctggcgaatctcgccaatcgcctgccagtcaatatgttccgcgcggtaaccctgctcttttgtccgcccatgtactaccagctccgtagcgccagcctgttgcaccgcatcggcgatttcaaatttcttctcaccgctgtcccagcccagacgcacttttacgctgacaggcaaatgcgccggtacagcttcgcgcatcgcttttgcaccctggtagatgagttcaggatctttcagtaacgttgccccaccaccgctaccgttaaccgttttcgacgggcagccgcagttaagatccacgccccaggagcctaactccaccgcacgggcggcgttctctgccagccactgtgggaactgccctaacaactgcacgcgcaccagcgtaccggatggtgtccggctggcattttgtagctcagggcaaatgcgatgaaagacttttactggcagcagttgatccaccacgcggacaaactcggtgatgcacagatcgtagtcgttaacttcggtcagtaattcccgcaccaaagagtcaagtacaccctccatcggagccagtaacacacgcatatcatcacccgcaaaaaaatgaggcgctatgttagcgcctccggtcaacggattaaaggtctgcaaagagggattgctgcaaactgcaatccctctctatgcttgatgtatgcctgagttcgctgcgcattgcgtaataccggggagcgaaaaaataagcgctgatttcttaatgtgatcggtagcacgttttacgaattaattgtatgatgaatccatctcatctggggtgttgattatgagtaagacactgaacattatctggcaatatttacgcgctttcgtcctgatttatgcctgcctgtatgcaggcattttcattgcttccctgctaccggtaaccattccgggcagcatcatcgggatgctgatcctgtttgtcctgctggccttgcaaattcttccggcgaaatgggtcaatccggggtgctacgtactgattcgctatatggcgctattgtttgtgccgattggtgtaggcgtcatgcaatattttgatttgctccgcgcacagtttggtccggtagtggtttcctgtgcagtcagtacgctggtggtttttctggtggtgagctggagttcacaactggtgcacggtgaacgtaaagtcgtaggtcagaaaggatcagaagaatgatggcgaatatctggtggtcattaccgctgacgttgattgtcttttttgccgcccgcaaactggcggcacggtataagtttcccctgcttaacccgttgctggtagcaatggtggtgatcattccttttttaatgctgactggcatctcttacgacagctactttaaaggtagcgaagtgctaaacgatctgctgcaaccggcggtcgtcgcactggcctatcctttatatgagcagctacaccagatccgcgcgcgctggaaatcgatcatcaccatctgttttatcggcagcgtggttgcgatggtgacggggacttctgtggcattgttgatgggcgcttcaccggaaatcgccgcgtcaatcctgccgaaatcagtcaccacgcctattgcaatggcagttggcggcagtattggcggtattccggcaatcagcgcagtttgcgtgattttcgtcggcatcctcggcgctgtgtttggccatacattgcttaatgcgatgcgtattcataccaaagctgcgcgcggtctggcaatggggacagcctcgcacgccctcggtacggcgcgctgcgccgagctggattatcaggaaggtgcatttagttcgctggcgctggtgttatgcgggattattacttcgctgatcgcaccgttccttttcccgattattctggcagtaatgggctaaaatttgcgatgcgtcgcgcatttttgatgtaagtttcacgcgttgcataattaatgagatttagatcacatataaagccataacgggttcgtaaactgttatcccattacatgattatgaggcaacgccatgcatccacgttttcaaaccgcttttgcccaacttgcggataacttgcaatctgcactggaacctattctggcagacaagtacttccccgctttgttgaccggggagcaagtctcatcgctgaagagcgcaacggggctggacgaagacgcgctggcattcgcactacttccgctggcggcggcctgtgcgcgtacgccattgtcgaattttaatgttggcgcaattgcgcgcggtgtgagcggaacctggtatttcggtgccaatatggaatttattggtgcgacaatgcagcaaaccgttcatgccgaacaaagcgcgatcagccacgcctggctgagtggtgaaaaagcgcttgcagccatcaccgttaactacacgccttgtggtcactgccgtcagtttatgaatgaactgaacagcggtctggatctgcgtattcatcttccgggacgcgaggcacacgcgctgcgtgactatctaccggatgcctttgggccgaaagatctggagattaaaacgctgctgatggacgagcaggatcacggctatgcgctgactggtgatgcgctttctcaggcggcgattgcggcggcaaaccgttcgcacatgccttacagtaagtcgccaagcggtgtcgcgctggaatgtaaagacggtcgtattttcagcggcagctacgctgaaaacgccgcattcaacccgactctgccgccgttgcagggggcgttaattctgttgaatctcaagggttatgattacccggatatccagcgcgcggttctggcagaaaaagccgatgcgccgttgattcagtgggatgccacctccgcaacgctgaaagctctcggctgtcacaatatcgaccgcgtgcttctcgcttaagcctggtgccggatgcggcgtgaacgccttgtccggcttgccagccctttcctggtgtcgaaaatcccggcaaacagtttgccgtttcttgcgcaaaaccagcgggtaaagtagcctgatggaaattttccttagatcgagtctcctgcatgttaaagcgcgtgttcctcagcctgttagtcctgatcggcttgctgctgttgactgtgctcggcctcgatcgctggatgagctggaaaaccgcgccttatatctacgacgaattgcaggatctcccctaccgccaggtcggtgtggtgctcggcacagcaaaatattatcggactggcgtaattaatcagtattatcgctaccgcattcaaggagcgattaatgcctataacagcggtaaggtaaattatctattactgagcggcgataacgcattgcaaagttataatgagccgatgaccatgcgcaaagatttaatcgcagccggtgtcgacccatcagatattgttctcgattacgcaggctttcgtacgctggattccatcgtacgtacacgcaaagttttcgatactaatgatttcattattatcacccaacgtttccactgtgagcgggcattatttattgcgctgcatatggggattcaggctcagtgttatgccgtaccgtcaccgaaagatatgctgtcagtacgtattcgcgaatttgccgcccgtttcggtgcgctggctgacctttatatttttaaacgtgaaccgcgttttttagggccgctggtccctattccggctatgcaccaggtgccggaagatgcgcaggggtatcccgccgtcacacccgaacagttacttgaattacaaaagaaacaaggaaagtagttatggatgtacagcagttttttgtcgttgccgtttttttccttatcccgatattttgtttccgcgaagcatggaaaggctggcgcgcaggcgcgattgataaacgggttaaaaatgcaccggaaccggtgtatgtctggcgagcgaaaaatcccggactcttcttcgcttatatggtggcatatatcggcttcggaattttatctatcggcatgattgtttatcttattttctatcgttaatattttcccttttctgttaattattgagaataattattacttcactcaataagctgcggatatcacattctgaaccgcagctatttgtgaatcctttcacagtttaaatttccccacgcgcatagccttaatatcagcacgcaatatttatttagcgttcgccttaattactcatagcattaaggaagatcacatgccgcaacaaaattatctggatgaactcactccggcttttacgcctttactggcgattaaagaagcctctcgctgtttattatgtcatgacgctccctgtagtcaggcttgcccggcacagaccgatccggggaaatttattcgctcaatctactttcgtaattttaaaggcgctgccgagacaattcgcgaaaataatgccctcggtgccgtttgtgccagagtgtgcccgacggagaaattatgccaaagcggttgtacacgtgccggtgttgatgctcccattgatatcggtcgtttacagcgttttgttactgattttgaacaacaaactgggatggaaatttatcagcccggtactaaaacgctcggcaaagtcgccattattggcgcaggtcctgccggattgcaggccagtgtgacgctgacaaaccagggttatgacgtcacgatccatgagaaagaagcacaacccggtggctggttgcgtaacggcattccgcaattccggttaccgcaatcggtgctggatgcagaaatcgcccgtatagaaaaaatgggcgtgaccattaagtgcaataacgaaatcggtaaaacacttaccctggagcagctgaaagcggaaaaccgcgcggtactggtcaccgtagggttatcgagcggttccgggttatcgctgtttgagcatagcgacgttgagattgccgtcgacttcctgcaacgtgcacgacaggcgcaaggcgatatcagcattccacaaagcgcattaattatcggcggcggtgatgtcgcgatggacgtagccagcacgctgaaagttctcggctgtcaggcggtaacctgcgtagcgcgtgaagagttagatgagtttccggcaagcgaaaaagagtttaccagcgccagagagctgggcgtttcgatcatcgatggatttacaccagtagccgtggaaggcaataaagtcacctttaagcatgttcgtttaccaggtgaactaacgatagcggcggacaaaattattctcgctgtaggtcaacatgccgaacttgctgttttttccgcactggaaccgcagcgtaacaccatcgaaacgcaacattaccagacccgcgacccgcaagtctttgctgctggcgatattgttgagggtgacaaaaccgtggtctatgcagtgaaaaccgggaaagaagccgccggggcgattcatcactatttagagggagcttgctcatgttaacgaaagatctttcgattactttttgcggcgtgaagtttcccaacccgttctgcctttcttcttcgccggtaggcaactgctatgagatgtgcgccaaagcctacgacacaggttggggcggcgtggtgtttaaaacgatcggtttttttatcgccaacgaagtctcgccgcgttttgatcatctggtgaaagaagataccggttttatcggcttcaaaaatatggagcagattgctgaacatccgttggaagagaatctggccgccctgcgtcggctgaaagaagattatccggacaaagtattgatcgcttcaatcatgggcgaaaatgagcagcaatgggaagagctggcgcgtctggtgcaagaagctggcgcggatatgatcgagtgtaacttctcctgtccgcaaatgacttctcatgcgatgggtagcgatgtcgggcaaagcccggagctggtagaaaaatattgtcgggcagtaaaacgtggttccacgctgccaatgctggcgaagatgacgccgaatattggtgatatgtgcgaagtggcgctggcggcgaagcgcggcggcgcagatggcattgcggcgattaacaccgttaaatccatcaccaatatcgatcttaatcagaaaattggtatgccgatcgttaacggtaaatcgagtatttccggatattccggtaaagcggtaaaaccgatcgccctacgctttattcagcaaatgcgcacccatccagaactgcgcgatttcccgatcagcggtatcggcggcattgaaacctgggaagatgcggcggagtttttattgctcggcgcagcgacgttgcaggtgaccaccggcattatgcagtacgggtatcggatagtggaagatatggcaagcgggttgtcgcattatctcgccgatcaagggtttgattcgttgcaggagatggtaggtctggcgaatcacaatattgtcccggcggaagatttagaccgcagttatattgtctatccccatatcaatcttgataaatgtgttggctgtggacgctgttatatttcctgttacgacggcggtcaccaggcgatggaatggagcgagaaaacccgcacaccgcattgtaataccgagaaatgcgtgggttgtctgctttgtggtcatgtctgcccggtaggttgtattgatcttggggaagtgaagtttaagaaaggcgagaaagaacacccggtaacgttgtagaacccgagtcacttccggcatttggttcctgtcgccggatgcggcttgaacgccttatccggcctacaaaaccatacaaatcagtatgttgtgctcattgtaggccggataaaacgcgccagcgttgcatccggcatttggttcctgtcgccggatgcggcgtgaacgccttatccggactacaaaaccacacagatcatgatgttatgtgcgtttatgaacgaatgcggaccacaatcacatcacttcttacgcgcgtatttcagtgaatccagcgccacggcgaagataataatcgcccctttgatgatgtactgccagtacgggtttacgccgatgtacgtcagaccatagttgatgacggtaaaaataatcaccccggtcaccacaccaattaccgtccccacaccgccgctgaacgatacgccgcctaccacgcacgccgcgatagcatccagctcatacataaagccgaggttgttggtggctgagccgatacgtccggcttctaacatcccgccgaaggcatagaacacaccagacaacgcgtaaatcatcagcaggttcaggccgacgttgacaccagatactttcgccgcttccgggttaccgccaatggcaaaaatgttcttaccgaagcgggttttgttccataacacccagacaaacaccaccgcaatcaacgcatagaaggtgatgtaagagagacggaaactccccagcgcaataaagccttgggcaaaagtggagaaaccactgtcaaaaccggaaattggcgatgccccgacaaagtcgtaatagagcgagttaatgccgtagacgataatcatcgtaccgagcgtggtaatgaacggcgtcacgttgagataggcgataatcaagccgttgatcaaaccgatcaccgcaccaatggcacagacaatcagaataaccagcgcaatcggcatcgtcgccatttccgggaacactttgttggcgttatccatggactgcaataacgtcgctgctactactgccgccagccccacctggcgacctgcggaaaggtcagtcccctgggtgacaattaaccctgccacaccaagcgcgataataatacgcaccgatgactgggtgagaatattacttaagttcaacagacttaaaaatgttgggtcctggaaaataataatcgccagcaaaactaaaagaacgacgtaaataccgccctctttcaggtaagtaagaaaacttttcttatttaatgcactcatgggaagcccctaatcttaaaggtgcaaagacgcaagacgcagaatttcgctttgcgttgttgtttttgtatcgacaattccggaaacgagaccattgctcataaccagaatacggtctgttatccctaacaactctggcatttcggaggagataataataatccccttgcctttcttcgccagttcggcaattaactgataaatctcaaacttagccccaacatcaataccgcgcgtcggttcatcgagcattaatatttctggttgcgttaacagccagcgaccaataatcactttttgctgattaccaccggagagcgaaccaatttgcgtccgatgccccggtgtttttacccgcatcgaatcaatcacccactgggtatcgcttttcatccgcgagttatccagtaaaccaactttatttttatagttgcggatattggaaattaacgagttaaagccaatatccagataggcataaattcccgttgagcggcgctcttcagttaccagtgcaaatccgtggtttatggcttcgttggcattatggttattgatctttttgccgtgcaacgtaatggtgccagccgatttctcgcgaataccaaataacgtctcaacaatatcggtacgtttcgctcccaccagaccggctataccgagaatctcccctttatgcagatcaaacgagacatcgcgtatcgacggctggcgcagcgacgtcaggttacgcacttccagaatcacttcgcccggcttgttttctttgtcagggaaacgctggttaagagaacgcccaaccatcatggcgatgatcttgtccatcgtcagtcctgccagcggttcggtagcgatccactgaccgtcgcgcaatacggtaacttcatcacataactggaagatttcttccattttatgcgagatataaacaataccgcagccgcgctcttttaatttacgaataatagtgaacagatgattgacctctttttcggttaacgaagaagtcggttcatccataatcacaattttcgcgttataggaaaacgctttggcgatttcgatcatctgcatttgcgaaacagataatgtaccgacgcgcgcacgcggatcgatatcaatatccagttcatcaaaaatcgctttggtttcgcggtacattttgtcctgatcgacaaacatgcctttggtgggatatcgccccagccacatgttgtccatcaccgaacgttgtaataccaggtttaactcctgatgtaccatcgaaataccattttccagtgcttctttggcggaatggaaatcgatctctttaccctggaataaaatggtgccagagtctttttgataaataccaaacaggcattttaataatgttgattttcccgcaccattttcccccattaatgcatggatagaatgtggtcggacttttaagttaacgttatcaagtgccttaacaccaggaaaagacttgttgataccgctcatttccaacaagtattccccggaagacggagtcgttgagctgaccatataattttaccttgttggccatacaataagggcgcagtaaacgactgcgcccaatcagtcttatttcttgctgaattcagccaggttgtctttatctacgccaacataaggtacgcggactactttgttgtcgattttccagttggtgccatcagccgcacctttgccatcggccaggtttttcgccagatcaaaggtcgctttcgcctggttgttagcatcgttcagtacggtgcccgccagtgcaccggatttcaccagcgccagcgcttctggcagcgcatcgacgccaaacaccggaatgctggacttgttgtgtgctttcagtgcttctaccgcgcccattgccatcgcgtcgttgttggcgataaccacctcgattttgttggcgttcgggccagacagccaggcgtccatcttatctttcgcctgagcggtatcccacatagcggtatctaactgtaactgttcagttttaatgcctttgtcgttcaattctttaatcacgtaagtggtacgtgcttctgcatccggatgccccggctcacctttcagcagtacgaattgaatctgaccgtctttgttcagatcccaaccctgattcgccgcccagtgtttagcaatcaaatcaccctgaataatgccggactctttggagtcagtgccaacgtagtaggctttgtcgtagctatccagcgccttacgagacggttctttgttgaagaaaaccaccggcacgttttgcccacgcgctttctcaatcaccgtacccgcagctgccgggtcaaccaggttgattgccagtgccttcacccctttcgccagcaatacgtcgatctgatcgttctgcttggactggtcattctgagaatcattcatcagcagctgaacatctggcgcggctttcgcatcttgctcaatagccttgcgcactacagacataaagttatcgtcgtacttatagattgttacaccaatgcgagtatcagcagcgtgtgcagcggcaccgaataacatgctggccatcacagcagacagggttaacaccttcttattcatggtatctccggtttttcttatgcagggtagtgcttgagataaatgctcggcggggcagtagagttaatgaagtgttactgaacgccgaagctcactttttaaaattcgttcttccatgcccggtaacgctccagaaaacggctttaattgttgttatgacgctattacctcggtgaaagtgattattcactgttacatacgggttacaacgttaaaacggtgcaatcatagccatcacattgttaagatactgtgaaatcactcacagattgaaagcggttacatcgcctgatttgttgagttagtgatcgccgccgcattctggcgtgttgcgacagaatggcgacgcactaacgtcggcataaaacagtggctggcacgaggatcaatattgtctgctgccccctgcaaggccagttcggtagctaatttagccattgaagcaatgggataacgcacagtcgttaattgcgggtcggtgtaacgggcgatgggaatatcatcgaaaccaatgattgagagatgtaacggaatcgcaatgccattatcttttaatgctgtcagtgcgccagcggccatattgtcgttataagcaaatacagcggttagttgtagattgcgccccagcagttcaaccatcgccgcctcaccgcccggcatgtccggcgtgccagtgccaatccagctttccggcggaataatatcctgctctttcaacgcactcatccagcctgctttacgcatggcgtcatcttcaatgccgtggctggaagaaagataaccaatacgttgatgaccgttattcagcaacatgcgcgtcgccattcgggcaccgctgagattatccaggcaaacgcaacgatgggcgtaccccggcacaacgcggttgattaacaccataccgggaatgttatccataaattgtgccagttcatcgtcactcaatgcttttgagtgaacaatcaacgcattacaacgctggcgaattaacacctcaatggcgtgacgctctttttccgcttcatgatagctattgccgattagcacgtatttctgatgctgctgggcgaccagatccaccgcttttaccagcgcgccgaaaaacgcatcagaaacgtccatcaccaccacgccaatggtatcgctaacctgagttgccagcgcctgggcattggcgtttggccgataatccagctcactcacggctttcattactgcttcacgcgtatcggcactgaccagcgtgctgttattgagcacccgggaaaccgttgccacagagacgccagcctgacgcgctacatcacgaatggtgatcatattcactacctgttatgagattgcagtaaatgactgcttgctggcggctattttgtcagcactgaatacaggacttcgtgaatcgagtcacagcaatggaaacggttacagccgttttgttaacgaatgtgatccagatcgttatcttgatgttttagatattgtcggtccggcagcacgcaaagttaactgacgccagagccattccaccggcccctggcggaagtaacgcagccagataacagagaagaagatattcgccagccataccggaataacaaacgccagcagctccagacggtcaaactgcataaacaaaccgaggtggtaaaaaagcgtagtacaaatcagcgtttgcaatagatagttggtcagtgccatccgtccgacacaggcgattgccagcaccagcttaaagcggcttaattgcggccagaagccataaaacagcgacgcatagccaatcgcctgaaacggcgcactcagttcccgcggcatctgaagtaagaaggcgcaccaacgatacgcccagtccagtcgccattgcagggcgatggcaggaaggttaatgatcaccccaatcgccaccagcacaaaaccagtacgacgatagtgacgaaagctgaactgccctttcagccagccactgcgcatcaatgcggcaccaatgagcatcatccctgccagttgccagccatactgtgcgcccagtgccagtaaactgttgccaacaccatcggcacgattactgatcgcgtcaacaccactgtgaagtttccagtgcttttcatacaaaatagccgatgcatcaggtgtccaggcgcggctggtctggctgtcggaaatcagccccaataacagcaaaacgccaagccccaccagataaagcatgacgcctgtattaaacaggctttttaccgatggcgcatcgcgcaccagccgccagcagattaagcccaccagcccgtaagccagcagaatatcgccgtcccagaacaataaaccgtgaataaagcccagcaagactaacagcgttaaccgcgactggatccatcgtctgccacggggcagcaacatttgcaggcccgcaccaaacagcagagcaaaaagcgtgaggaatttcacctggccgatgagatcgagaaatgcccaggtccatgcatcctgcgacgtaatagcgccgtaccaggcgggattgagataagccgcctttggtagcccaaaggcgctgatgtttaatagcaggatccccagaatggcgacgccgcgaacaaaatcgagcgtgacgttgcgctccatggttcctgccttttaatcagttgtgatgacgcacagcgcgcagaaactcgtggcgcgtattctgactggatttgaacaatccaccaagagaggtcgttgtcgtggcactggttgcatcgcggatgccacgcgccttcacgcagtaatgcaccgcgtcgatagagacagccacgttattggtgcccagcagcgtttgtagcgcaatgagaatttgctgcgtcagacgttcttgtacctgcggacgctgggcaaagaactgcacaatacggttaatttttgacagaccgatgaccgaatctttcgggatataggccaccgtcgctttgccatcgatggtaacaaaatggtgttcacaggtgctggtcagagtgatatcgcgcacggtgaccatttcatcgaccttcattttgttttcaatgagggtgattttcgggaaattggcgtaatccagaccggagaaaatttcatcgacatacattttagcgatgcgatgcggcgtttccatcaaactgtcatcagccaggtcgagattcagcagctgcatgatttcggtcatatgaccagcaataaggcttttgcgcgtttcgttatccatttcatgcacgggcgggcgcagcggtgtttccagtcctcgcgcaactaacgcttcatgaaccagggccgcttctttactgagtgatggcatttatgatttctcctgcaggtgtgacgcctccgccctgcgtgggggcaaagttattaagctgatttacagcctgattattgtgcgtgaggcggcgcacataatccagtattcacagcgataattattgtaattgccgctgcctttcatcagcagatgttaaaacatcgttatgcaaatacggaagtgaaagttactcacagcacattgaataaacggtatgatgaagaaattgcaaacaacacaacaaggagccacgcatggaaatgctcgaagagcaccgctgttttgaaggctggcagcaacgctggcgacacgactccagtaccttaaactgcccgatgacgttcagtatctttctcccaccacctcgtgatcacaccccgccaccagtgctgtactggctttccggattaacctgcaatgacgagaacttcaccaccaaggcgggtgcccagcgcgtggcggcggaactggggattgtactggtgatgccagacaccagcccgcgcggcgaacaggttgccaacgacgatggctacgatttaggccagggcgcggggttttatcttaacgccacgcaaccaccgtgggcgacgcattaccggatgtatgattatctgcgcgatgaattaccggcgctggttcagtcgcaatttaatgtcagcgaccgctgcgctattagcggtcattccatgggtggtcacggtgcgctgattatggcgctgaaaaatccgggtaaatacaccagcgtttccgcctttgcgccaattgtgaatccgtgcagcgtcccgtggggaatcaaagcgtttagcacttatttaggtgaggacaaaaatgcatggctggaatgggacagttgcgcgttgatgtatgccagtaacgcgcaggatgcaatcccgacgcttattgatcagggtgataatgatcagtttcttgctgaccaactgcaacctgcagtactggcagaagccgcgcgccagaaagcgtggccgatgacgctgcgtattcagccgggatatgatcacagttactacttcatcgcctcttttatagaggatcacctgcgcttccatgcgcagtatttactgaagtgaaagtccgcccggttcgccgggcatcttctcatcagaagcgataatccactgccataaagtaacgacgtccgtcttcgttatagctgtagtcgtcacgactgagatccttgtcgccaaggttcagcacgcctgcgcgcagtttgacgtctttagtcacctgccaggccgcgccggtattccagatggtataaccgcccggtgttttagccgtcgcgctgtcggcgcgtttctgcccggtatagtgaccagaaacatagaatgaccagtcttccagcgccagcggtttccagtccagcgtaccgttagcagtatggaacggcagatcggatagcggtttgttttcgccgttgctgacatcacgaccatcgttgtaggtgtagttgatcgacagtttccattcatcgttgaacggaattttcagttcggtttccacgccctgaatacgagctttgttaacgttgtagtagctaaataccggtatgcgccgtccgttagcgcccgtctcaaaaccgacaaagttttggtagcccggtgcagcattgacgtcagacgtacggctaatgctgatacgatctttcacatcgttacggaaaacggtaacgctggattcaaccccttccagccagccttcttcacccatgtagtaaagccccagctcccaactttcgctggtttctggtttcagatccgggctacccacaatcttacatgcgccacggcaggaattgctcgtccagtcagggctaagttgcaacagagaaggggctttaaatgccgtcgcccagccccctttcaccgttacggtgtcggtggcgttataaaccaggtaggcacgcggactccagtgttcaccgtaggtttcgtgatcgtccatacgcacgccggtcgtcagcgccagcggctcgaagatccgccattcatcttccacaaacagcgcgtactggctggcagacgttttggagctggttcccccggtcaggttcaccgcatcgctaagtttgtcgtgacgccattcaccgccaaccgtgagaaactgattaatcgccgtcagcggcaacgtgtatttgccgtcgaccgtattgctttcggaagttatcgggctgctgttgccagggtttttgttctcgactttctcaccgtagtatttcagttcgctggtgccgtaatcccaacgcccattatggctgacggagtagttctggcgttccaggcggtttttgtccagcgagtcggaatcacgatcctgacggtcgaaaccgtatccggcagtaaaatcgtgattttgattcggtgtccaggcaaattcgacattgccgtcgcggctggagaatccttcaatacgcggcgtttctccggtatcggtggtcgttgagttttgcgggtcatccttttcacgttttgccaggctgccgtaagctttcattcccagcacgccgtcaattaatggtccgctggtaaagaattgaccgttataggtatcaccgcgatcgcgatgttcctgaacggtggtatcgacggtaacggtgcccgaccatttctgaccgatttttttggtgatgatattcactacaccgccgagcgcatcggaaccgtacagcgacgacatcgggccacgaaccacttcaatacgttcgatggaatcgaccgggatccagttcagatcgaaatcattgtggcggaagacggcattgcgggagttaacgcgtttaccgtcgacaagaatcagggtgtagctgctgtccagaccacgaatacttacgcccttacggttatccccttcgttcgtcagttgtacgccaggcacttctttgaggacatccttcagattctgtaccggttttcgctgcaggtcttcctgggtaatgacgctgatactggcgggagcatctttaaggttttgttcaacggaagatgcagtgacaaccatcgtttcgccatcatcatcgaccgctaacacaggccatgcacaagaaatagcggacaaacacagcccgacccgtacgaaagggttcaacctaaacattccatatctccatgaggtaactacgaaaataaaatgggtatcgctcacatcttctttacgtccccttgcgtacggcagcatcgcggtggacttatttgtatgcaggtgatcatcccagaaagccggaacagcctctgatttgtcagccttttttgattgcggcgtaacgataatgcaaacgataacaattataaatccaaatgttaaattttatatccgcatgatttgtcagggaaatggaattgaaaaagccctctcggttgagagggcttagcaaggaagggaggaaacttatttcttatcgttctgcgggaacttcatttcgctgtagcgtacgaagtgagttcctttaatcagcttgtagccgaaccaaataatcaggaacagcgggataccaatatacgttgccgctacgccgccccagtcaatggtatctttcaggaacgcttcgtagttctggcccaaagtgataatcagacacagaatgaatgcgaagatcggccccagtgggaagaaaccggaacggtacggcagatcgttaatgtcgtgtccctgcaatacgtacccgcgacggaaacgatagtggctaatggcaatccccagccaggcgataaaacccgtcatcccggaggtgttcagcagccacaggtataccgtctggttgccaaacatggaggtcaggaagcacaaaccggcaatcaccgtcgtcgcatacagcgcattacgcggcacgccaccacgcgacagtttagcgaaaatgcgcggcgctttaccgtcacacgccagggtatacagcatacgagtagacgcatacataccggagttacctgctgacagcaccgccgtcagaataactgcgttcatcaccgccgccgcagagagcagacccgcgtgctggaacaccagggtgaacggactgacgctgatgtctttaacatcgttacgcagcaggctcggatcggtatacggaataatcaggctgataatcaggatcgcgaacacatagaacaacaggattcgccagaatacctgacgtaccgcgcgtggaatgtttttcgccggatcttcggactcgcctgcagcaataccgatcagctcggttccctggaaagagaagccgacaatcatagctacgccgatcatcgccgcaaaaccaccagcaaacggcgcttcgccgattgtccagttgctccagcctgcaggctgcgcgcctttgaagataccgataatcatcagcacgccaacgatgataaagacaataactgtcgtgactttgatcagtgagaaccagtattccgcttcaccaaagccgcgaacagagatgtagttcaacaggaagataacgccgaggaacaacgcactccagatccagcccggtgtatccgggaaccaccagctcatgaccagctgtgctgcaaccaggtcaacggcaatagtcaccgcccagttgtaccagtagttccagcccagcgcgaagccaaagccttcttcaacatagttctgaccgtaagtggcaaacgaaccggaaaccggcatatatgcagccagttcaccgagactggtcatcaggaagtaaaccatcaggccaatcagcatatacgagagcaatgccccgcccggacctgcctgagaaatcgttgcgccagaggcaacaaaaagacctgtaccgatggaaccgccaatggcaatcatcgtcaggtgacgcgcctttaattcacggcgtaagcccggcgcttctgtagttttagtttcggaacccatacaaaaatgctatccatcttaaaaatgaggcgcgattgtagcagacgattggcaatccttccggcagaaatacacggttataagacaccttcatgatcgcccagggattataagtaaagcagccaatctcttttctggcgaatgcatgctgagggcgctgcgtcacgaaatcgacacagcaccagcatgttcttgtacagcaccttaacgcggtacattcgcgggatcgcaatagtccagaaagcgccgtagcgcgttggaaaggtgtttttgccgatgatgtatacgccacaacgtacgcatcaggcgcggcagagggaccgcaacttcacttaatgtgcctgcctgcaattgatcttcaatcacccgtcgcgacaggcaactaattcccaacccatgacgcaccgcatgtttgattgcctcggagttacctaattccatcgccatctcaaacttcggtaaatgtgacagcaacagataatcgacaatctcccgcgtgccggaaccgcgttcacgcaggatccacggcgcagcggccagctgttctaaggtgaccggaccacgagccaacggcgaagtcggcgcggcgaaaaccaccagctcgtcttccagccacggttcagaaatgatttcagtgctgtggcacggtccttcaataaagccaatatcaacgcggaaatccagcaccgcttgcatcacgtcctggctattcccaacgctaagttcaatcggcaactgcggataatcatggcgataacgggcgataactgcaggcagaatgtagttaccgatggtactactggcatagatacgaatcgcaccgttgtcttcgcgaaacagttgttcgatttcaaccgcctgttcaagcagtgccaacgctcgcggatagagcagccgcccgtgttcattaacaaccagtcttttccccacgcgatcaaacagttgaacgccaagctgcccttccaggtcggtcaaggctgcgctcactgctgattgcgacaacgccagcatcaccgacgcctgggtggttgatccacttttcaatacttctgcaaaaacttccaactgccggagggtgatgtgcatagtcgcttaccacttataaagattaattataaatatataatcaattttatttttaaaccagttagtcgtaaccttatgcccggttaaaggagagggttatgacgaatatcaccttacagaaacaacatcgtacactgtggcattttattccggggttagccctgagtgcagttatcaccggggtcgccctgtggggtggttccattcccgcggttgcgggtgccgggtttagtgccctcaccctcgcaatcttgttggggatggttttaggcaacaccatttacccgcacatctggaaaagctgtgacggtggtgtgctgtttgccaagcaatatttattacgtctgggtatcattctttatggcttccgtctgacgttctcgcaaattgccgatgtcggtatcagtgggatcatcattgacgtgttgacgctgtccagtaccttcctgctggcttgcttcctggggcagaaagtgtttggtctggataagcacaccagctggttgatcggtgccggtagcagtatctgtggtgctgccgcggtactggcgactgagccggtagtgaaagcagaagccagtaaagtaaccgtggctgttgcaaccgttgttatcttcgggaccgtcgcgattttcctctacccggcgatatatccgctgatgtctcaatggtttagtccggaaactttcggtatctacattggttctactgtgcacgaagtggcgcaggtggtggcggcaggtcatgccatcagcccggatgcagaaaacgcagcagttatttccaaaatgctgcgcgtgatgatgctggctccgttcctcatcctgctggcggcgcgtgttaaacagctgtctgggacgaacagcggcgagaaaagcaaaatcactattccgtggtttgccatcttgttcatcgtcgttgccatctttaactcgttccacctgttaccgcagagcgtggtgaacatgctggtaacgctggataccttcctgctggcaatggcgatggcggcgctgggtctgaccactcacgtcagcgcgctgaaaaaagccggggcgaaacctctgctgatggcactggtactgtttgcctggctgattgttggtggtggtgcgattaactatgtgattcaaagcgtcatcgcataaaccactacatcttgctcctgttaacccgctatcattaccgttttcctccagcgggtttaacaggagtcctcgcatgaaatacattggagcgcacgttagtgctgctggcggtctggcaaatgccgcaattcgcgccgccgaaatcgacgcaaccgcgtttgccttgttcaccaaaaaccaacgtcagtggcgtgccgcaccgctcacgacgcaaaccatcgatgaattcaaagccgcctgtgaaaaatatcactacacatcggcgcaaattcttccccacgacagttatctgattaacctcggacatccggttgctgaagctctggaaaaatcgcgcgatgcctttatagatgaaatgcagcgttgcgaacagctggggctttctttgctcaacttccaccctggcagccatctgatgcagatttcagaagaggattgccttgcgcgtattgccgaatccatcaacattgcgctggataaaactcaaggtgtcaccgcggtgattgaaaacaccgccggtcagggcagtaacttagggtttaaattcgaacatctcgcagcgattatcgacggcgtggaagataaatcccgcgtcggcgtctgcattgatacctgccatgctttcgctgccgggtatgatttgcgtactcctgccgaatgcgagaaaacgttcgctgattttgcccgtattgtaggctttaagtatctgcgcgggatgcacctcaacgatgcgaaaagcacctttggcagccgcgttgaccgtcatcatagcctcggcgaaggcaatatcggtcatgatgcgttccgctggatcatgcaagacgaccgtttcgacggcattccgctgatccttgaaaccatcaacccggatatctgggcagaagagatcgcctggctgaaagcgcaacaaactgaaaaagcggtggcctgatcgatgaacgacagggaaaagcagattcttaaaattttacggcgtaacccgctgattcaacagaatgaaatcgccgatattctgcaaatcagccgctcacgtgttgccgctcatattatggatttgatgcgcaagggtttgattaaaggcaaaggatatatccttaccgagcaggattactgtgtggttgtgggtgcaatcaatatggatattcgcggaatggcggatatccgttacccgcaagcagcctctcatccaggttctgttcactgttccgcaggcggcgtcggacgtaatatcgcgcataacctggctctgcttggtcgggatgtgcatttaatttcagctattggcaacgatttttacggcgagacattactggaagaaacgcgccgcgcgggcgtgaacgtttcaaactgcattcgtctgcatggacacagcactgcaacttatctcgctatcgctaataagcaggaagaaactatcctggcaatcaatgacacacatattctgcaacagctaacgcctcaactgctcaatacttcacgggacttgattcgccatgctggtgtggtgctggctgattgtaatctcacacctgaagccctggagtgggtctttaccattgctgatgaaattccgatgtttgtcgataccgtttccgaatttaaagcgaacaaagtaaaaaactggtacagccggatccacactctgaaaccgacacaaaatgaactggaaattttgtgggggcaaccgattaaagacgacaacgatcgcatcagagctgtaaattcgctgcatcaacaaggtgttaaacgcatttttgtttatctgaaagatgaatctgtattttgcagcgataaggatggagaacaatttttgctgaccgcgccagcgcatacgacagtagacagttttggtgctgacgatggttttatggcgggcctggtatatagctttcttgaaggatacagtttccgcgacagcgcccgttttgcgatagcctgcgcggcaatttcacgcgccagcggcagcttaaacaaccctaccctgtctgccgataacgcgctttcattagtgccaatggtgtaacaatgttgccggattcgacgcttgaccgcatcttatccggctcataaattgcgcactacgctaaaccaataaagaatcctgcaatagtagcactcatcaggttactgacagcaaaaacgcaatagccagtaataccaccattcccagaacacttctcatgacatccatagttattatctcttcatgtcattttgggcgacggctctctgcccatcataaatagccgggcctgcatcttgcgatactgacccggcttgttatcaacacttaatgggtttttatgtagccgcgtacgcactcttcgactaatccccagaaccagtcggtatcaatagtgatgccgactttggtattggcgggcttgccaagaacacccagctcgtcgcagacggtacgcccatagcaagggccactgttaacgtccacttcgacgtacatctcctgggttttaatgccatcagggttaatcaaataaccgatgcaggtggcgtcgtgcaccgggccgccagccaggccgtagttttcgaactgcgttttgagagtgaagttcatgatgtcgctgaacagctctccggcagggccgccagccctttccatccgagcaatcacgtccggggtgcaaacggtctggttggtaagatcgaggcccatcatcactaatggaacgccggaggtgaacaccacgcgtgcggcctccgggtcagcaaagatgttgaactcagcagatggggtgaagttgccagtaccataagcaccgcccatcagaacaatttcacggattttcggcaggatcgcgggttgcatacgcattgccaccgcgatgtttgacaacggaccaaccggcaccagagtgatatcgccatcgcttgccataagggtatcgatgatatatttcaccgcatgagtgttttctgcctggcgggtcagcggctcgaataccgggccatccagtccggtttcaccgtgaatattatcggcaacaatttgttgacgcataatgggctgcggcatccccgcataaaccggaacattaatctccagtttctggcaaacattcaggccattaattaatgttttatcgagggtttgattacccgctacaatggtgatacctaataaatcaatcgccggatgtttcgccgccatcattatagcaatagcatcatcatgacccggatcacaatccagaataatttttctcttttccattgtttatttcctctgtttccagttgcgttattgtttctacagcaaagaaaattcgacctggccgatgattgaatcttaacaacagcgtacgtatgctaaatatgagaaatctcatagcggataaacatcgtgaaagaaatccacaataatgatcttaagcagcaattgatgagtgaatctgcgtttaaggattgcttttcaacggatgtttcagccgatacgcggctgtttcattttttagcgcgtgactacattgtgcaggaagggcaacagccgtcctggctgttttacctgacgcgaggccgcgccaggctttacgtcacgcttgctaatggtcgcgtgtcgctgatcgatttctttgccgcgccctgttttattggcgagattgagttaatcgacaaagaccatgaaccgcgtgcagtgcaggctattgaagagtgttggtgccttgcgctccctatgaagcattaccgcccgttgttattaaacgacacgctatttttacgaaaactctgcgtcaccttaagtcataaaaattatcgtaatattgtttctttaactcagaatcaatcatttccgttagtgaatcgcctggcagcttttatattactctcgcaggaaggtgatctttatcacgaaaagcatacgcaagcggcagagtatttaggcgtttcttatcgacatcttttatatgttcttgcgcaattcattaatgacggtttattaattaaaagcaagaaagggtatctcattaaaaacagaaagcagttgtcaggactggcgctggagatggacccggagaataaattctccgggatgatgcagtaaaaattattggcaatagtgcgattgccggatgcaacgcttaataaggcgtacatccggcaatgaaactcaagctaaaccaataaagaacccggcaatggtcgcgctcatcaggttggaaagcgtcgccgccgccagcgcccgtaaaccaagctgggcgatttccggcgcgcgttttggcgaaatagccgaaaacgctccaacgacaacaccgatagaaccaaagtttgcaaacccacagagggcgaacgagataatggcaatggtcttgacatccagcgtgccgctcgtttgcagatagggcgagaaattgagataagcaacaaactcattaatcgccagtttctgcccaatcaaacttccggcaagatttgcatcactccagtccacccccataatccatgccaacggggccagcacatagccgaaaatgctttccagagagacattggcaaaaccaaaccagccgccaactccaccaataatgccgttgatcagcgcaataattgcgacaaacgccattaccaccgtcgccacaccggcggcgattttcagcccagtcattgcaccgttcgccgcagcttcaataatgctttttggcggtgtttcgctaaacgacagattttcaaacgtaacttgcgaaggttccgtcgccggactaagaatacgtgcaaacaggataccgccaggaatagccatcagcgaagcggctaacaaatagtcaatcggcacgcccattccggcatagccaatcatcatcgaacccgcaatagacgccatgccgctacaaatagccgtaaatagctcgttgcgattcatgcgatcaataaaaggtttaacgatcgccgggatctcattttgcccgaggaaaatagtggtgactgcgacaaaagattcgattttgctgatgttgagggctttctgaaaaatactgccaagaatacgaatcagcagccccattacgccaatgtagtacagcaagctgataagcgcggtaacgaaaataatcgccgggagtacgcgaaaggcgaagataaagcccgcaccgtcaaacagaacatccattttgggaccgaccagcgaaccaaaaataaaggcacttcctgcgtcactgtaggacatcactttatggacgcctaatgccgcctgctctactgcccattttcccgggggaaaatagagcatgatgccaccaatggcaatttgcagcagcagcgcagccccaaccgtgcgcaagctgatgctctttttatttaccgacaacacaaaggcaattgccagcaataccaccatccccacaacacttctcattatatccataatgattttcccttcatgccagtaaacccggcgtcagcgccaggttttggtatgtttgatgagtacgggcgacggctttctgcccaccagaaattaacccacgagacgctgatattctttggcaatttcgctcgccagaatggcgttattaaagaccagttgaatattggatttcaggctatcaccgccggttagctccgcaacacgcgccagcaggaacggtgtactctctttcccaataacaccctgttcttcggcttcagcaacggcttgatcaattgctgcattgatggtttcttctggcatcgcaaactgttccgggatcgggttcgctaccaccaggccgccgttcaaaccggtttgccacttcactgccatcgcgcgagcaatttcgcgggcactgtcgagacgaatgctgacttcaaatgggctggttcggcagaaaaacgcaggcagcgcttttgtctgataaccaattaacggtacaccgaaggtttctaaatattctgttgttaatcctaaatcgagaatagattttgcccccgcacaaacaacagtgacattggtatttgccagttcctgtaaatcggcagaaatatcgaaggtatgttccgctccgcgatgcacaccaccaatacctccggttgcaaaaactttaatcccagccagtgctgcaataatcatggttgatgcaacggtagtcgcgccatttttccctgcagcaacgacaaaaggtaaatcacggacggactaactttcgtcacgttatgtccttcacggcccagcaattcgatttcttctttacttaagcccactttcatcacaccgccaataatggcgatagtggctggtactgcgccctgtttacgaattgtttcttctacttcaattgcggtttgggcattttgtgggaatggcattccgtgagaaattatggtcgattccagcgcaacaaccggttttttattttttaaagcatcctgtacttcagcggatatttgtaataattcaggggacagagttaattcagacattctgtgttctccactaacgatgtaacattggcaattgataattcagggttgttggtatattcacaggcaagtgccattgacgaacatccctgcgcaaatcgaacagaatcgataaacggcataccgtctacccaacaggaggccagccccgccatcatggcgtcgcctgccccagtaacattgatgacattcgttttaataggggccgaccacccactttcaccgttgatatcactgtagtaaacgccatcccctcccatgctaagcaccaggcggttcaggccgtgttgatgaaaccaggcggcgacctttgcgacatcttcacgtccggaaagtgcaattccgctcaacgtttcggcttcaagacggttaggttttaacgtatggattttgctcagatgatcgcggattttgacgcatttccatgccgataccggatcaataaatacaggcgtttccccgctattttccagaacccagaccagcgcctcttcactaaggttgcaatccgcgacaataacctttgcaccgcgaataaactcctgatgctgggcaagaaattctgcagaaatacagtcactaatactcatatcatttatcgcgacaagcatttctcctgtattatcgagcagtgataaatagctggatgtattctcacccggaacaattaagcatttatcgacataaacaccggattgattagtttgcgccagtaatgattgcccataaaaatcaccacctactgcacttaaaagccaggcatttttccccagtaacgccagattatgagcgatattccttcccacgccacctggggtaaatttaatttttccgggattcgaatccgcataattcaatggatgatgtgaatacccagccacatcaatattcgccgagccaataattactatgtagtccttttcgcgcatagcacgccccctggcaataaattgccaacgaagaaattgggtaaaatagtcattacagtcaataagactattagagcacgtgttcagatttaaacacatgttcataataagcatgtttaacgcaatgtaaatcgatcagaaaaaacgaaatcggccagatatgaaggcggtcacaaaatttgtctatttatgcagcaacaaaagagaaagttgtgatgtgtaacacacaatatggcaggcaagaaaaagggcagagatgtttctgccctcagattgttgacaatgcgcgctttgttcatgctggatgtggcgtaaacgccttatccgacctacaaaagcgcaaaaattcaatatattgcagggttcatgtaggtctgataagcatagcgcatcaggcaattttgcgtttgtcatcatcggggcagagatgtctcagccccgatgatgaagagaaattatgcgtttttttctactatttgtgtttccgggcgtttgaggaaggcataggccaaacccgccaccagcgtaccggcaataattgctaccaggtaacccaataccggcgtaatagcgccagggatcagcagaacaaacagaccaccgtgtggtgccatcagttttgcaccaatcgccattgagattgcgccagtcagcgccccaccaacgatacagcacggtagcacacgcatcggatcacgagcagcaaacggaattgcaccttccgaaataaagcacagaccaagtaccagagcggctttgccaccttcctgctgcgctttgtcgaatttgcgacgcgccaccattgttgccagacccattgccagcggtggcaccatacctgccgccataatcgccgccatcgggccataggtttgagtactcagcagacccacaccgaatgcgtacgctgctttgtttaccggaccgcccatgtcagtacacatcatgccaccgaggatcgcccccagcagaaccgcattcgcagtccccatggtctgcagccagtgagtcaacccatcgagaatgccagcaaccggtttaccgattaggtagatcatcgccagaccgaccaccagactggaaattagcggaatgatcaggatcggtttcagtgcctccatactctgtggcagtttcagttgcgtactgattaacttcgcaatgtaacccgccaagaagcccgcaataataccaccaatgaagccagaaccggtgctaaccgccagcataccgccaatcagacccggcgtgagacccggacgatcggcaatggagaaggcaatataacctgccagtaccggcaccatcagcgcaaaggctgaaccaccaccaatctgcatcagcgccgctgccaacgtacccggctctttaaacgcttcgataccaaaagcaaaagaaagcgcgatacacagaccacctgcaacaaccatcggcagcatgtaagagacgcccgtcagcaagtgacggtaagcgcctgcactctctttcttaccttcagtggtcgctgtttgagttttgcccgccggttcatacggcgttgcttcagcaaccgctttatccagttcctgcgcagttttcttcagcgccagaccggtagaggtgcgatacatcggtttaccagcaaatttcgccagatctacttcgatatctgccgccacaatcaccagatccgctgctgcgacttcttcaggggtgattgcattacccgcgccaacagaaccacgggtttcaactttcacccaccagccacgttttttcgcttcggtttcaatggcttcagccgccataaaggtgtgtgctacgccagtcgggcaagcagtcaccgcaactacgcgtttcggaccgctggcagcaaccggtgctgtcgcagcgaccggcgcagtgtaaggtttcgcatggcctttggcttcactcaggaacagctcagggtgcgcaactgcccgggaaatatcgcccagccagacatttttaccgttcagcgcgctgtcgttcgggatggaatcaccgagaacaatcgccatttcagcgtcgttcggattgtcgatgatttccagttttgcttttcgcgccgccgcgcccagcagggtcttcgccatataggcgcgtgcctgaccgagattagcgtcaataatcagcagcgttttcattatgcctctcctgctgtcagttaaaaggttgtaagtcgacgcgcgccatcattgcggccaactgcggacgatcggtaatacccacattgctttgacttaccgccagggctgcaacagctgtcgccagacgcagtgtgtgttcactggattcacgcatcagcaagccataaatcaggccaccaaccatagaatcccctgcgccaacggtgcttacgacatcgactgacggtggtttggcgatccattcgccggaggcattaacccaaagcgcgccttcggcacccagtgaaataacgacatgcgcgataccttgttcacgcagcgcatgcgcagcttcaatcacatctttcatttcaggcagtttacggcctgcccagatttccagctcgcggcggttaggtttcaccagccacggtgccgctttcaaacctgctactaacgcttcacggctactatcaaagataatgcaaggacactgactacgcaggcgagtcatccagtcggtgaacgcttccgggctgacgcctgacggtaagcttccgctgacacagaccatatcgaactgaccgagccagctcagagaatcagtcacaaagcgttcccagtcggcgggggtgacttcaaaacccgagaagttgaagtcggtcacttcgccgtctttttccgtcagcttaacgttaattcgggtgcgcccctgtacaacctggaaacggttggcaatgcccagctcgctgaacagttgctgaaaaccatcctgattgtctttacccaggaagccgccaacggtgacatcaattcccaggtcttttaatactttggccacgttgatgcctttacccgccgcatgcagaccggtggttttcaccaggttcacttcgccgcgttcaatttccgggcagaaaccaacaaggtcataagccggattaagggtgatcgtagcaacacgtctgctcattatgcgccctccccaagaccagcagcgatagcgtcgccaatggctttcagcgcctgttcagcatctgtaccctgggcggtaaagcgtaggcgatgacctttcttaacgccaagtgccacaactttcatcagactacgtccgtttgccggtttgccggtgccatcaaggtttgtcacggtaatatcactgttaaattgtttaatggtattgaccagcatggtacctggacgagcatgcaggccgtgttcattgcgcaccacaaactccgcgcttaacacgtcgtcggtcggcgcatcatcgctggtcagcagcgccagcaacgttgccgcatccgctttcagcaagcggtcagctttattatcgagcaacaaatcagcgagacgcttaagaaccgcgatgggctgatcgtcattcatcgccacactcaccagcatggctgccgtttcgccgtccacatcaaaagcatttgccgcacggcttaccgcaatcgcgctacgcagattgccttcggcgctatcgctcagccagataccctgcccgaggttcagcggttgttcattgatggctttggtgacgaaagtggcgtcaactgcccccgcttctttcagacgcgcagcgttcagcgcctgaagagtcagcagatcgctggcgacgatatccagcgtcagcatttcgttgtcgagcttcagctgctcactctgcttttcgcccatcagcaatgcgcgaagttcttctgctgttgttgctgacttcagttgttcagcaacggaatcatcgctcagtacgtgggtcagctggcgtagcaggcccagatgttcatccgagctggcagcaataccgatcgccacgtacgctacctggccgtcaccccaggtgacgccttccgggaactgaaatacctgaacgccggttttcagcacctgatcgcgggtgtcggtagtgccgtgtggaatagcaataccattgccgaggaacgttgaggtttgctgttcgcgcgccagcatgccattgacgtagccttcagctacattaccggcctgcaccagcgccgcagcgacctggcgaatcgcctcttctttgtctccggccttttcgcccggatggatgtcctgtacggataactggaacatagttctcctctcttgctgaattgaaacgattcagcttctatgagaaaaaagcgccaacctggcttagggttaaagacaagatcgcgctgaaacgtttcaagaaagcataatacttttgtttcagcacgcaaggaaagccgtaaagttatgagcaaaagtttgatgtgctgcacaattttttgtcatttttcctaattgctgatgggaaaatccgttatcagcaatttcatttcagcagcgtcagcagccaatcagcaacagtgaaatggcattttgattattcgtggcgcttttgatttcgctgtctgtttattttctgacaagcagcgtaaactccgcgtcttcctcttccagtgatcgaccagcatgcataactcccccgcagtcaccagcgcgaaatcgtttgacctgacctcgacggcgtttttaatcgttgcctttctcaccggtattgcgggcgctctgcaaaccccgacactcagtatttttcttactgatgaagtacatgcccgtccggcgatggtgggattcttctttaccggcagcgctgtcattgggattctggtgagtcagtttctcgccgggcgctctgataagcgcggcgatcgcaaatcgctgattgtcttttgctgcctgttaggcgtgctggcctgcaccctttttgcctggaatcgcaactactttgttttgctattcgttggcgtctttcttagcagctttggctcaaccgctaacccgcaaatgtttgcccttgcccgtgaacatgctgacaaaaccggacgtgaggcggtgatgttcagctcttttttacgcgctcaggtttcactggcatgggtcattggcccaccgctggcttatgccttagcgatgggtttcagctttacggtaatgtatctgagcgcagcggtagcgtttattgtttgcggcgtgatggtgtggctgtttttgccgtcgatgcaaaaagagcttccgctggcgaccggcacggttgaagcgccgcgccgtaaccgtcgcgatacgttgctgctgtttgtcatttgtacattgatgtggggctcgaacagcctgtacatcatcaacatgccgctatttattatcaacgaactgcatcttcccgagaaactggccggtgtgatgatggggaccgccgcagggctggaaatcccgaccatgttgatcgccggatattttgccaaacgtctgggtaagcgcttcttaatgcgcgttgctgccgtgggtggcgtctgtttttacgcaggaatgctgatggcgcattcacctgtcattctgttgggcttgcagctgctaaatgctatttttattggcattctgggcggcatcgggatgctctattttcaggatttgatgcccggtcaggcaggttcagccaccacgctctataccaacacgtcgcgcgtgggctggatcatcgcaggatcagtggcgggcatcgtcgccgagatctggaattatcacgctgtgttctggtttgcgatggtgatgattatcgctactctgttttgcttactgcgaattaaagatgtttaaggcgcggtcagcatttccagatcgataagccaggtcattgcctgctgacgcgagttgccgcacatttcagcgctggcttgtaagcctgcacagactttcggtcgcagtggcgaggtgaaaattttacagcgttgctgttcatcaagctgaatgcagggcgtattggcgggcttgccatctggcataccgggaatagggctggaaattgaaggggcagtgcaacacgccccgcaacccggacggcattccatacgttgttctcttaaggttaaccaccggattgatgagcgcgcacagtaccaccttttttgcaccagcaaaagtgcgaataccacttgcccgaaaggcccgtcgcgagtactttgtcgcgatatttttgacattttcgactacaggaatttttcgatgccaagagcgaacgaaattaaaaaaggtatggtactgaattacaacggcaaactgctgctggttaaggacattgatattcagtcgcccactgcccgcggtgccgctacgctgtacaaaatgcgtttttctgatgtccgtaccgggctgaaagtagaagagcgtttcaaaggtgatgatatcgttgacaccgtgacgctgacccgccgttacgttgacttctcctatgtcgatggcaacgaatatgtctttatggataaagaagactataccccgtataccttcaccaaagatcagattgaagaagagttgctgtttatgcctgagggcggcatgccggacatgcaggtgctgacctgggacggtcaattgctggcgcttgagctgccgcagaccgttgatctggaaatcgttgaaactgcaccaggcatcaaaggggcatctgccagcgcccgtaacaaaccggcgacattgagcactggtctggtgattcaggtaccagaatacttaagcccgggcgaaaaaattcgtatccatatcgaagaacgccgttatatgggtcgtgctgactaacttcagccgcatgcagaaaagggatagctcaggctgtcccttttttaatttattataccaatcttctattttgcgcttcctgaacaccttacgcccgcaattttcactcgttgattgatcgccctcacacttcatcgcattaacaatccagaccaatttcaattgttgtcatataactttacactgtcattgttaattaatcgttactaagacgtgactcctatgaatacaatcgcctccattacgctcccgcatcatgtacacgctccacgctacgatcgacagcagttgcaatcacgtatcgttcattttggctttggagcctttcaccgcgcacatcaggcgttactgaccgatcgtgtgctgaatgcccagggcggcgactgggggatctgtgagatcagcttgttcagcggcgatcaactgatgagccagctccgcgcacagaaccatttatataccgtgctggagaaaggtgcggacggcaatcaggcgataattgtcggtgccgttcacgactgcctgaatgcaaaactggattccttagcggcaattattgagaaattttgcgagccacaggtggcaattgtttccctgacgattaccgaaaaaggctattgtattgacccggccaccggtgcactcgacaccagcaatccgcggattattcacgatcttcaaaatcctgaagaacctcactccgcgccgggtattctcgtcgaagcactgaaacgacgccgtgaacgcggccttgcaccgtttaccgtactctcctgcgacaatattcccgacaatggccatgtggtgaaaaacgcggtgctggggatggcggaaaaacgttcaccagaactcgccgggtggataaaagaacacgtcagttttccgggaaccatggtcgaccgtattgttccggcagcaaccgacgaatcactggcagaaatcagccagcatctgggggtgaatgatccctgcgcgattagctgcgaaccgtttatccagtgggtggtggaagataacttcgtcgctgggcgtcctgcctgggaagtcgctggtgtacaaatggtgaatgatgtcctgccatgggaagagatgaaactgcgtatgcttaatggcagccactcttttctcgcttatctgggttacctctcaggattcgcgcacatcagtgattgcatgcaggatcgcgcatttcgccatgccgccagaacattaatgctggatgagcaagcgccgacactgcggattaaagatgtcgatttaacacaatatgcggataagttaattgcacgttttgctaatccggcactgaaacataagacctggcaaatcgcgatggatggcagccagaaattaccgcaacgcatgctggcaggtattcgcatacatctggggcgcgaaacggactggtcgttgctggcattaggcgttgcaggctggatgcgttacgtcagcggcgttgatgatgccggaaatgccattgatgttcgcgatccgcttagcgataaaattcgtgaacttgttgcgggcagcagcagtgaacaacgcgtaaccgccctgctttccctgcgtgaaattttcggtgatgatctgccagataacccgcattttgtgcaggccatcgaacaagcctggcaacaaatcgcacaattcggcgcgcatcaggcgctattaaacaccctcaaaatttaacgatttctgcggttaaagcggatgaagctcgccttcgtccgctctccccttctcttttctgccttttttagccaggattaacgctcagttaacttaccagagtattgcggagccgttgtgaccagaaccaacctcatcaccggttttctcggcagcgggaaaactacgtcgattcttcatctgttagcccataaagatcccaacgaaaaatgggcggtactggttaatgaatttggggaagtcggaattgatggtgctttgctcgccgatagcggcgcactgctgaaagagatccccggcggttgcatgtgctgcgttaatggtttacccatgcaggtagggttgaataccttactgcgtcagggaaaaccagaccgcttgttgatagagccgaccgggctgggccatccgaaacagctcctcgatctcttaaccgcacccgtctatgaaccgtggatagatctgcgcgccacgttgtgcattctcgatccacgcctgttgctggacgaaaaaagcgccagcaatgaaaacttccgtgaccaactggctgccgcagacattattgtcgccaataaatccgaccgtgcgacgcccgaaagtgagcaagcgctagagcgctggtggcagcaaaatggtggcgatcggcaattaattcacagcgagcatggaaaaattgacggtcatcttctggatttgccgcgtcgcaatttagccgagttgcccgccagcgccgcgcattctcatcagcatagcgtgaaaaaagggttagcagcgttaagcctgccagagcatcaacgctggcgtcgcagtctgaacagcggacaagggcatcaggcctgtggctggatattcgacgctgatacggtattcgacaccattggtattctggaatgggcgcgacttgcaccggtggaacgcgtcaaaggcgtgctgcgtattcccgaagggctggtgcgaatcaaccgtcagggcgatgacctgcacattgaaacgcaaaacgttgcgccaccggacagtcgtattgagctgatttccagcagcgaagctgactggaatgccttgcagagcgcgctgttgaagcttcgtttagcgactaccgcgtaaggttgcctgcgtttttcagtaagataattagagaaaatatgattaaaaatttgccgcaaatagtgttgttgaatattgtcggcctcgcgctgtttctttcctggtatattcccattaatcatggattctggttgccgattgatgcggatattttttatttctttaatcagaaactggtcgaaagtaaggcctttttgtggctggttgcattgaccaacaatcgcgctttcgacggttgttcactgctggcgatgggaatgttgatgctgagtttctggctgaaagaaaacgccccaggcagacgacgtatcgtgattattggtctggtcatgctattaactgcagtggtattaaaccagctgggtcaggcattaattcctgtaaaacgggccagcccaacgttgacttttaccaatattaaccgcgtcagcgaactgctctctgttcccacgaaagatgcctcacgagatagctttcccggcgatcacggtatgatgctgcttattttttcggcattcatgtggcgttatttcggcaaagttgcaggccttatcgcccttattatttttgtggtttttgcgtttcccagagtaatgattggcgcacactggtttactgacatcatcgtcggttccatgaccgtgatattgatcggtttgccctgggtgttgctgacgccattaagtgatcgattaatcaccttttttgacaaatcacttcctggaaaaaacaaacatttccaaaacaaataactcacagtaattaacatcatcaggtttatttttatagtgaggataatcctgatgatgcgcctcctgctttcatccatcgagcgcaaaaatcattctctaagtaaatgaatggattgcatgcgtttcactcaatcgtactttaattgaccaatcccgctgattaactttctgtatcactttttcttataaaaaatcatgtaaaaccgctcgccaagaccgcaccaatcgggtaatctcgaactcgttttgcctcggcggtagattatcctcacagcatataattttgtgcgttagtccacagatttggccttaaggaattgtttcaacatgcccaggtaattagtctcgtgtcgcttggcatttttttataacgatatttgtcgttaaggacttcaagggaaaacaaacaacatggtcaaatctcaaccgattttgagatatatcttgcgcgggatccccgcgattgcagtagcggttctgctttctgcatgtagtgcaaataacaccgcaaagaatatgcatcctgagacacgtgcagtgggtagtgaaacatcatcactgcaagcttctcaggatgaatttgaaaacctggttcgtaatgtcgacgtaaaatcgcgaattatggatcagtatgctgactggaaaggcgtacgctatcgtctgggcggcagcactaaaaaaggtatcgattgttctggtttcgtacagcgtacattccgtgagcaatttggcttagaacttccgcgttcgacttatgaacagcaggaaatgggtaaatctgtttcccgcagtaatttgcgtacgggtgatttagttctgttccgtgccggttcaacgggacgccatgtcggtatttatatcggcaacaaccagtttgtccatgcttccaccagcagtggtgttattatttccagcatgaatgaaccatactggaagaagcgttacaacgaagcacgccgggttctcagccgcagctaataaaccgtttggatgcaatcccttggctatcctgacgagttaactgaaagcactgcttaggcagtgcttttttgttttcattcatcagagaaaatgatgtttccgcgtcttgatccaggctatagtccggtcattgttatcttttaaatgttgtcgtaatttcaggaaattaacggaatcatgtttatacgcgctcccaattctggacgtaagctcctgcttacctgcattgttgcaggcgtgatgattgcgatactggtgagctgccttcagtttttagtggcctggcataagcacgaagccaaatacgacacactgattaccgacgtacaaaagtatctcgatacctattttgccgaccttaaatccactactgatcggctccagccgctgaccttagatacctgccagcaggctaaccccgaactgaccgcccgcgcggcgtttagcatgaatgttcgtacgtttgtgctggtaaaagataaaaaaacattctgttcatctgcgaccggtgagatggacattccactcaatgaattgattccggcgctcgacattaataaaaacgtcgatatggcgatcttacccggcacgccgatggtgccgaacaaacccgcaatcgtcatctggtatcgcaaccctttgctgaaaaatagcggcgtgtttgccgctctgaatctcaacctgacgccttcactcttttatagttcacggcaggaagattacgatggcctagccctcattattggtaatactgcgctatctaccttttcttcacgtttgatgaacgttaatgaattaaccgacatgccggtccgtgaaactaaaattgcgggcattcctttgaccgttcggctttatgcagatgactggacatggaacgatgtgtggtacgcatttttactgggtggcatgagtggaactttcgttggacttctctgctattacctgatgagtgtgcgtatgcgcccaggcagagaaatcatgaccgccatcaagcgcgaacaattttacgtggtgtatcaaccggtggttgatacacaagctttgcgggtaacgggcctggaagtactgctacgctggcgacatccagtagcaggtgaaatccccccggatgccttcattaactttgccgaagcgcaaaagatgattgtgccactgactcagcacctgtttgagttgattgcccgcgatgccgcagaattagaaaaagtactgccggtaggcgtcaaatttggcattaacattgcgccagcccacttgcacagcgaaagctttaaagcggatatccagaaactgctcacttccctgcccgcacaccatttccagattgtgctggaaattaccgagcgcgatatgctgaaagagcgagaagccacacaactcttcgcctggctgcattcggtcggcgtagaaattgctattgatgacttcggcaccgggcacagcgcgcttatctatcttgagcgttttacgctcgattatctgaaaattgatcgtggatttatcaacgccatcggtacggaaacgatcacttcacccgtacttgacgcggtgctgacgctggcgaaacgtctcaatatgctgacagttgctgaaggggtcgaaacgccagaacaggcacgatggctaagcgaacgcggcgttaatttcatgcaaggctactggattagtcgcccgttaccgctggacgattttgttcgctggctgaagaaaccgtatacgccgcagtggtaaggtgtgcttacgtcccttattattcatagtgaaagcatgccggattgcggctaatgatgagtaaaaggaaatccgttgcagatgattgtgcgcatactgctgctgtttatcgctctgttcacctttggtgcgcaggcgcaggctatcaaggaaagctatgcctttgccgtactgggcgaaccccggtacgcatttaatttcaaccattttgattatgtgaaccccgccgcgccaaaaggtgggcaaataacgttgtctgccctcggcaccttcgataatttcaaccgctatgcactacgcggcaacccgggcgcacgcaccgagcagctgtacgacacgctatttacgacttccgatgacgaaccaggcagttattacccgctgattgctgaaagcgcacgctatgctgacgattattcctgggtggaggtcgctattaatccgcgcgcccgttttcatgatggttcgcccattactgcccgcgatgtagagtttacttttcaaaaatttatgaccgaaggcgtgccgcaatttcgtctggtctacaaaggcaccaccgtcaaagccattgcgccgttaaccgtgcgcattgagttagctaaacccggcaaagaagatatgctgagtctgttttcgctgccggtatttccagaaaagtactggaaagatcacaaacttagcgacccgctcgccacgcctccgcttgccagtggtccgtaccgcattacgtcctggaaaatggggcaaaatattgtctattcccgcgtgaaagattactgggcagcaaacttaccggtaaaccgtggacgctggaatttcgacaccattcgctacgattattacctcgatgataatgtcgcctttgaagcgtttaaagccggtgcctttgatttgcgtatggaaaacgacgccaaaaactgggccacgcgctatagcggtaaaaatttcgataaaaaatacatcatcaaagatgagcaaaagaacgaatcagcccaggatacgcgctggctggcgtttaatatccaacgtccgatattcagcgatcgccgggtccgggaagcgatcactctcgcctttgactttgaatggatgaacaaggcgttgttttacaatgcctggagtcgcacgaacagttattttcagaataccgaatatgcggccagaaattaccccgacgccgcggaactggtgcttctggcaccaatgaaaaaagatctaccgccagaagtcttcacgcaaatctaccagccgccggtatccaaaggcgatggctacgatcgtgacaacctgttaaaagccgacaaacttctcaacgaagcaggctgggtgctgaagggtcagcaacgcgttaatgtcacaacgggtcagccactcagctttgaattattgcttcccgcaagcagcaatagtcagtgggtattgccgttccagcacagcctgcaacggctgggtatcaacatggacattcgcaaggtggataactcgcaaatcaccaaccgcatgcgcagtcgcgactatgacatgatgccgcgcgtatggcgggcgatgccgtggcccagttccgatttacaaatttcctggtcatcggaatatatcaattccacttataatgcccccggcgtgcaaagcccggttatcgactcgctgatcaaccaaattattgccgcgcagggaaataaagaaaaattactgccgttgggacgagcactggatcgcgtattaacgtggaattattacatgctgccaatgtggtacatggcggaagaccgtctcgcctggtgggataaattctcccaacccgctgtacgccctgtttacagcctgggtattgatacctggtggtatgacgttaataaagcgacgaaactgccgtcagccagacaacagggagagtagatgggcgcttatctgattcgccgtctgttgctggtgatcccaacgttatgggcgattatcactatcaactttttcatcgtgcaaattgcgcctggcggtccggtcgaccaggccatcgccgccattgagtttggtaatgccggagtattacccggcgcaggcggtgaaggtgttcgcgccagccatgcgcaaacgggcgtcggcaatatcagcgacagtaattaccgtggcggacgcggattagatccagaagtgatcgccgagatcactcatcgctacggtttcaataagccgatccacgaacgttacttcaaaatgctctgggactacatccgttttgattttggcgacagcctttttcgcagcgcctcggtgctgacgctgattaaagacagtctgccggtctccatcaccctcggattgtggagcacgctgattatctatctggtgtcgattccgttaggcattcgcaaagctgtttataatgggagccgttttgacgtctggagtagtgcatttatcatcatcggctacgccattccggcctttttgtttgccatcctgctgattgtcttcttcgcgggcggcagctatttcgatctgttccctctgcgcggcctggtttccgctaactttgattcgctgccgtggtatcagaaaatcaccgattatctgtggcatatcacgctgccggtgctggcgacagtgattggcggctttgcggctctgaccatgctgacaaaaaactcattccttgatgaagtgcgtaagcaatacgtggtgacggcacgtgcgaaaggggtaagtgaaaaaaatattctctggaaacatgtgttccgcaacgccatgctgctggtgattgccggttttccggcgacgtttatcagcatgttttttaccggctcgctgctgattgaggtgatgttttcactcaatggtcttggcttactgggctacgaagcgaccgtctcgcgcgattatcctgtaatgtttggtaccttgtatattttcaccctgattggcctgctgctgaatattgtcagtgatatcagctatacgctggtcgatccgcgtatagattttgagggacgttaatgtcgcgactcagccccgtcaatcaggcccgttgggcgcgttttcgccataaccgtcgcggctactggtcgttatggattttcctcgtcttgtttggtttgagtttgtgttctgaacttatcgccaacgataaaccgttgctggtgcgttatgacggcagttggtatttcccgttgttgaaaaactacagcgaaagcgattttggcggcccgctggcaagtcaggctgattatcaggacccgtggctgaaacaacggctggaaaataacggctgggtactgtgggcaccgattcgctttggtgctaccagtatcaactttgctaccgataagcccttcccttctccaccctcccggcaaaactggctgggaacggatgccaatggcggcgatgtgctggcacgcattctctatggcacgcggatctcagttctgtttggcctgatgctgaccctctgctccagcgtgatgggcgtgctggcgggggcgctacaaggctattacggtggtaaagtcgatctctgggggcaacgttttattgaagtatggtcggggatgccgacgctgtttttgattattttactttccagcgtcgtacagcctaacttctggtggctgttggcaattaccgtcttgtttggctggatgagtctggtcggtgtggtgcgggcggagtttttacgtacccgtaatttcgactacatccgcgcggcgcaggcgcttggcgtcagcgatcgcagtatcatcctgcgtcatatgttgccaaatgccatggtcgctaccctcacttttttaccgtttattttatgtagttcgataaccaccctgacctcactcgatttcctcggcttcggtctgccgctcggttcaccgtcactcggtgaactgctgttacaagggaaaaataaccttcaggccccgtggcttgggatcaccgccttcttatcggtggcgatattgttgtctttgttgatctttattggtgaagccgtccgcgacgcatttgatcctaataaggcggtgtagcatgacgcaaactctgttagcgattgaaaatttgtcggtgggttttcgccatcagcaaaccgtacgtacagtagtcaatgatgtttcactacagattgcggctggcgaaacgctggcgctggtaggtgagtctggttcaggtaagagcgttaccgcgctgtcaattttacgcctgctcccttgcccgccggttgaatatctctccggcgatattcgttttcatggcgaatcgctgcttcatgccagcgatcaaacgttgcgcggtgtacgcggtaataagatcgccatgatttttcaggagccgatggtgtcgttaaatccattacataccctggaaaaacagctttatgaagtactttcactccaccgcgggatgcgtcgggaagcggctcgtggcgaaattcttaactgccttgatcgcgtcggtatccgccaggcggcaaaacggctgacagattatccgcatcagctctccggcggcgaacgccagcgggtgatgattgcgatggcgctgttaacgcgaccggaattattaattgccgatgaaccaaccaccgcgctggacgtctctgtccaggcgcagattttacagctgttgcgcgaactgcaaggcgagctgaatatgggtatgctgtttattactcataacctcagcattgtcagaaaactggcccaccgcgtggcggtaatgcaaaacggtcgctgtgtcgagaaaaataacgccgctacgctatttgcctcacccactcatccttacacacaaaagctactcaacagtgaaccatctggcgacccggtgccattgccagaacccgcctcaacgttgctagatgttgaacagcttcaggttgccttccccatccgcaaagggattttgaagcgcattgtggatcataatgtggtggtgaaaaacatcagttttacgctacgggcgggtgaaacactgggtttagtgggcgagtccggttccgggaaaagcacgacgggactggcgctgctgcgactgattaattctcatggcagcatcgtctttgacggtcagccactgcaaaatttaaatcgccgccagctgttacctattcgtcatcgcattcaggtggtatttcaggatccaaactcctcactcaacccacgactcaacgttttgcaaattattgaggaaggcttacgggttcaccagccgacgctttctgccgcacaacgcgaacaacaagtgatagccgtgatgcatgaagtgggattagatcctgaaacacgccaccgttatccggcggagttctctggtggtcagcggcaacgtattgcgattgccagggcgttaattcttaagccctcgctgatcattcttgatgaaccaacatcatcactcgacaaaacggtgcaggcgcaaatattgacgctattgaaatcattgcaacaaaagcatcaactggcctatttgtttatcagccacgatttgcacgttgtccgcgcgttatgtcatcaggttatcgtactgcgacaaggggaagtagtggaacaaggaccgtgcgcgcgcgtgtttgccgcaccgcagcaggagtatacgcgtcagctactggcgttgagctgacgcttaaaaaggattgtagtttgaaaagggttcggcaattgccacaccaaaatttttcaatcggcatgttgcagcaaattcgtcctggcgatttacaaacaggcacggctcaccttcacactccagcaccgaacatggaacttcgatgtcgcttaacgcctggcttagtttgtacatcaccgaccatgcattatcaccatccgggctaagcaatttaagcgccaccaggctgttgtcaccgcacggtccattttgcggaatcggttcaaccttcgaacctgcgaaaccagcagaccagcgatagttctgcggcagtcgatggacgattgagagttgtaatgaagtcacttattttccccggaagtacattttacttcacaatttgtttacatcaattttaacacatcatcaacaatccgtctttatacagatcgtaaagattgatgcctcgcctgcgtggcctctatggctctgatttaaataatatctgcgggcgtggtcacgtttgcggggctatatgtacccgtttctgcgatctaactcaacctttttaactacaatgatgtgactttttacataaattgattttacataaaataaacatatatcgggggaatgatagatttgtggttgacatgcatcaacaaaggaagccttttagcttcctcgttgtgcaatagatcaccgttttttcggccgactggcgtacaaacagaagagaatggagctggttgcgcagaatgcaattgaccaaatcatcggccatgcagagttaaaggtcgcaagagaaagtaatgcgccaacaattgcccctatgccgaaacggaaggttcctgccagcgaagatgccgttcccgccatatggggaaactcatcaagaatgaccgccatcgcattggatgacaccatcgacacgcagcccacaaacgccgcaacgccaaccaccagcgaccagaatcccagccccagcagtgcactgatgaccatccacgctgccataataaactgtatccacaaccccgagcggaacatatttaacgcgccaatacggcggacgaagcggctgttaaagatggtcatcacgaacagaaaaagaatgtttagcgcaaagtaataaccaaagttttccggcgcgacgtggttgatttcaatgtagacaaacggtccggcgcttaagaatgagaacatcccggcaaagctgaaaccgctggccagcatataactcaggacacgcttatgacggaacagcgccgcaaagttaccaatagtggtacgaatgtgaaaaggctggcgacgctccggcggtaaggtttctttgatcagaaagaagatcattgccgaagccagaatcgccgccacggcgaggatccagaagatgtaatgccagctcagccacaccagcacccagccgccaactatcggtgccatcagcggtgcaatggtcgtcaccagcatgacaaacgacatcattcgcgagaactcttctttcgggtagatatcacgcatcaaagcgttgataaccacgctggccgcagccgcagccagcccgtggaagaaacgcatcacaatcagctgatcgatggtgtttgccaacgcacacgccaccgcggcggcggcaaacaccagcgtaccgccgagcaccaccggcttacgcccgaagctgtctgccatcggcccgtagattaactgccccaacgcaaagcccagaatataagtactcagggtcatctgcgtactgcccgccggtacaccaaactgcgctgaaattaccggtagcgcaggcagatacatatcaatcgacagcggcatcaacatggccagcaggccaaggataaaaacaatagcaaacgacgaatgctgtcgggtggtcacaacgggctcctgaaagtcattgaaaagttagacgacgctggcaatttcttcttcagttaacggacgatattcaccgggggctaaatcagcatccagcgtaatgccgccaatacgttcacgatgcagctcaaccacatggttacccacggcggcgaacatgcgtttcacctgatgataacgcccttcgctgatggtcagacgaacctgcgttggggtaatcacttccagcaccgccggcttagtgagatctttttcgttatgcagctgcacgcctttagcaaattgctctgccgtatcgtcagctacgggtgattccagcgttaccagataggtcttctcgcaatgatggcgcggggaagtaatgcggtgcgaccactgaccatcatctgtcattagtaccagaccggtggtatcgatatccagacgccctgcagcgtgcagtttccacgctaccggttcatcaagaaaatagagcaccgttgggtgatccgggtcgtccgtggagcaaacatagccctgaggcttattgagcatgaagtaacgtggaccgtgttgctgcgccagcgggttgccatcgtaagcgacatcatgttcagggagcagtttgaacgctgcattacggacgatttcgccatcgacggtgacacgattgccgcggatttcacgcccggcaatagcacggctaacgccgagttgctgtgcgataaatttatcaagtcgcatgtgtgtgattttgcctgtaaaaaacggaggtcgggtaatgacccgaaaatctgaactgttgtctgcccagtatagcggtctaataacttccctcaagggaaaaagatccgtggcatactattagcagaataatctacctacgcgagaccatgatttttacactccgcccatatcagcaagaagccgtggatgccacgctcaaccattttcgtcgtcataaaacccctgccgtaatcgtgctgcccaccggtgcaggtaaaagcctggtgatagcggaactggcgcggctggcgcgtggtcgcgtgctggtgttggcacacgttaaagaactggtggcacaaaaccatgaaaaatatcaggcgctggggctggaagccgatatttttgccgccgggctaaagcgcaaagagagccacggtaaagttgtatttggcagcgtgcagtcggtcacccgtaatcttgatgcctttcagggtgaattttcgctgttgattgtcgatgaatgccaccgtattggtgacgatgaagagagccagtatcagcaaatcctcactcacctgaccaaagtgaatccccacttacgcctgctggggctgactgccacgccttttcgactgggcaaaggctggatttatcagttccattatcacggcatggtacgcggcgatgagaaagcccttttccgtgactgcatttatgagctgccgctgcgttatatgattaaacacggctatctgacgccgccagaacggctggatatgccagtcgtgcaatacgatttcagccgcttgcaggcacagagtaacggactgttcagcgaagccgatctcaaccgcgagctgaaaaaacagcaacgcattacgccacacatcatcagccaaatcatggagtttgctgcaacgcgcaaaggggtgatgattttcgccgcgacggtcgaacacgcaaaagagattgtgggattactgcctgccgaagatgcagcactgattactggcgacacacccggctctgagcgcgatgtgttaattgatgattttaaagcccagcgttttcgctatctggtcaacgtcgcggtactgaccaccggatttgacgccccgcacgtcgatcttatcgccattctgcgccctaccgaatcagtgagtctttaccaacaaattgtcgggcgcggtctgcgcctggcccccggcaagactgattgcttaattcttgattatgcgggtaaccctcacgatctctacgcgccggaagttggtacaccgaaaggcaaaagtgacaacgttccggtacaggttttctgccctgcctgcggttttgccaacaccttttgggggaaaacgaccgccgacgggacattgattgaacactttggtcgtcgctgtcagggatggtttgaagatgacgacggacatcgcgaacagtgtgacttccgtttccgttttaaaaattgcccgcaatgtaacgcagaaaatgatattgccgctcgccgctgccgcgaatgtgacacggtactggttgatccggatgatatgttaaaagcggcgctacgactgaaagacgcgctggtattacgctgtagcggcatgtctttgcagcatggacacgacgagaaaggcgaatggttgaaaatcacctattacgatgaagacggcgcggatgtgagtgagcgtttccgtctgcaaacgcccgcccagcgtaccgccttcgagcagctttttatccgcccgcatacgcgcacaccgggcatccctctgcgctggatcaccgccgccgatatcctcgcccagcaagcattactgcgacacccggattttgtcgtcgcccgcatgaaaggtcagtactggcaagtgcgtgaaaaagtgttcgattacgaaggtcgttttcgtcgggcgcacgaattacgcggttaatggtagttttgattgatgtataaggcgattgagtatagaatctcgcccgcttttgcatacgcaaagcagatcacttacctgttgctgggtcgcctgtagcaggattaatttaagagagaaagaaatgtttactatcaacgcagaagtacgtaaagagcagggtaagggtgcgagccgccgcctgcgtgccgctaacaagttcccggcaatcatctacggtggcaaagaagcgccgctggctgtcgaactggatcacgacaaagtcatgaacatgcaagttaaagctgaattctacagcgaagttctgaccatcgttgttgacggtaaagaaatcaaagttaaagctcaggacgtacagcgtcacccgtacaaaccgaagctgctgcacatcgacttcgttcgcgcttaattgctgaataagttgtaaaaaaccccgctccggcggggttttttgtctctgcaaattatgcctgattacggtattgctattttttgcaggccagataaggcgttcacgccgcatctggcattcagaacacaaaaccgattaattgccgccagacgtccggcgctgcaattgatcgcgcaagttcggcggcgtgcctttaatggtcagggtatcggttgctggatcccagaagatgcgttcacctaacagcatcgcatcaaagttaatagtcaagccaccgccgctaccggcaaacttcgtcaactgacgcagtgtgctacggtctgccgggaagctctcttccagttcgtagcctttttcagccgcaaactccgtgaagctcacttcgctgacgcctgccagctctttcgacagcgattccagttcaatctcttcacctgcctgcagctgctcattacagtagctataaacctgctggcgcacgttctgtcgctctgctttatccagttgtgcttcggcagtgaaatcatcgaccgcttgcaacagcccacggttttgcgctttcgcgtttaacccttcgctggcaccgaggaaatccataaagaaatccgccactttgcgccctactcgccctttcaggaaagtgagatagcgggtcgactctggattggtttcccactcggttaaatcgatacgcgcaacaatatccgcatgattgatatcaagataatgggttgggttgatgtcgagattttcgttaacacgcatactgctcaggttgctcagaactgccaccagcagatactccaccgccagatagcgatagtggcaaaacagcacgaatccaccgtcagcaaaaggatatttcgctaattcgtcacgcaggcgaccggttgccgcgcggctaaatgccagaaagtcctcttcgccctgacgctgtaagcgcagcgtctgcgccagttcactctcttcgctaaacaagccgtaagctttatttttggcgctatagacccgatgcagttctgccaccatctcaacgacggtttccgtcggttccagcaatgaatcgcgcaacaccagctcaaggttctgctcatcacgcttgataagctggtgcagagcaatctggttgatatccagactcatgataaactctcctttaagaccgggcggtattcaaccaccgccggttaagcgacgcaataaaagatggcggtcattttacagaaggcagcgtaacgagaatgatttaacgcataaaaaagcagaaaaaaaaccgttgctacggtaatatgttgccctttcatcaactaactgatttcgatttatgccacaaatttcccgctacagtgatgaacaggttgaacaattgctcgcagagctgctcaacgtactggaaaaacataaggctccgaccgacctttccctgatggtgttaggcaacatggtcactaaccttatcaacaccagcattgccccggcccaacgccaggcaattgccaactcttttgcccgcgccttacagtcctctatcaacgaagacaaagcgcactaagggaaacagataacaggttatggtaactcatcgtcagcgctaccgtgaaaaagtctcccagatggtcagttgggggcactggtttgcactgttcaatattctgctttcgctcgtcattggcagccgttacctgtttatcgccgactggccgacaacgcttgctggtcgcatttattcctacgtaagcattatcggtcatttcagcttcctggtgttcgccacctacttgctgatcctcttcccgctaacctttatcgtcggctcccagaggctgatgaggtttttgtccgtcattctggcaacggcgggaatgacgctattactgatcgacagcgaagtctttactcgtttccatctccatcttaatcccatcgtctggcagctggttatcaacccagacgaaaatgagatggcgcgcgactggcagctaatgttcatcagtgtgccggttattttattgcttgaactggtgtttgcgacgtggagctggcaaaagctgcgcagcctgacgcgtcgtcggcgcttcgcgcgcccgctggccgcattcttatttatcgcctttatcgcctcgcatgtggtttatatctgggccgatgccaacttctatcgcccgatcaccatgcagcgcgctaacctgccgctttcgtacccgatgacggcacgacgttttcttgagaagcatggcctgcttgatgcgcaggagtatcaacgccgtcttattgagcaaggcaatccagacgccgtttccgttcagtatccgttaagcgaactgcgctatcgcgatatgggcaccgggcagaatgtgctgttgattactgtcgatggcctgaactactcacgcttcgagaagcagatgcctgcgctggcaggttttgctgagcaaaatatttcgttcacgcgccatatgagctccggcaacactacagacaacggcatctttggcctgttctatggcatctcgccgagctatatggacggcattctgtcgactcgtacgcctgcggcgttaattactgcgcttaatcagcaaggctatcagctggggttattctcatcagatggctttaccagcccgctgtatcgtcaggcattgttgtcagatttctcgatgccgagtgtacgcacccaatccgacgaacagaccgccacgcagtggatcaactggctgggccgctacgcacaagaagataaccgctggttctcgtgggtctctttcaatggcacaaacattgacgacagcaatcagcaggcatttgcacggaaatatagccgggcagcaggcaatgtcgatgaccagatcaaccgcgtgctcaatgcactgcgtgattctggcaaactggacaatacggtggtgattatcactgccgggcggggtattccgctgagcgaagaggaagaaacctttgactggtcccacggtcatctgcaggtgccattagtgattcactggccaggcaccccggcgcagcgtattaatgcgctgactgatcataccgatctgatgacgacgctgatgcaacgcctgctacatgtcagcacacctgccagcgaatattcgcaaggtcaggatttgttcaaccctcaacgccgccattactgggttaccgccgcggataacgatacgctggcaattaccaccccgaaaaagacgctggtgctgaacaataacggtaaataccgcacttacaacttacgtggtgaaagagtgaaagatgaaaaaccacagttaagtttgttattgcaagtactgacagacgagaagcgttttatcgctaactgattaattataaatcagttagcaaaatatcttacttgcaatcggtgtggaaaacggtagtattagcagccacgagtcggcacgtagcgcagcctggtagcgcaccgtcatggggtgtcgggggtcggaggttcaaatcctctcgtgccgaccaaaaatcccaagaaaaccaacctattgcggttggtttttttatatctgcatttaattcgataaacagacagcgacacatcacggcctgtttattttctgttatcagaacgtccagactacacccgcctgagttgtgctgctttcttcacgggagaaacggctgtcgataccaagcgttagccccgtcaatgtttgctcaaagccagcgcctgcatcagtggtcacgttgttgcggctgttaattgccgaactccacatcgccgccctttacgctaccaagacgctcacgcacggtgtccagttctgcatcaaataccagcggttgtgctgccgccatattcagcacatccgtggttgaagggggcatttgtgcgcgattctctgcgagactccagctatggttgccattatccagcaaggtatattcatacgtactgatatcaacaacgcctccggcattgcccaacgtaaatgccgcatcaccgcgcccgttgttaccagtgtaaggttatctcctgctgccggcctggcaccggtgtccgtcacgaatattttgaaatcacctgttgctttaacctccagtagccctcccttttctataacggcaaagacggcaatcccatctttttcaacaattaagcgcccgcctttaatcgtgggatcattcgccgcgccataaacctgtagcactccattattgatcgtagtctggtttaccgcgccacccatttgaacaatttgataaccatcatttaatactgagtattctgcggtgccatttatttcaatgtactgatatcccccgttaatttcagtattactacttacaccaaattcttatatatgctgttctccgccaggattgattttcgtattattggcggccctacaaaccagctggatatctttttccaggacaacaccatcaactgtctcaccatactcaacagttgatgccaatgctatgggcgaatataacgctgtagccaccagaacagatattgcggaacgacaaagagaaacagaaccagattggtgcattaagctttcatcctatgaaattaattgctgttaaaagcattggggacagaaaatacccatagctccatacccggagtcagttttaaaaaactgtttaaagaaatgcacaagtattgtgattgattttttagttgtttttcctgatgagaagctgatgcaaaattccgtctttataatgaagatgatgccaaagcgaacgacaaagttgtagttttcactacatgtccatacataaaatggggtaacattcacgcgcctggtagcgttaccaacgctacgctcaaacataatgattctaataaaacctcaggagactactatgcctgaagcaacgccttttcaggtgatgattgtggatgatcatccacttatgcgacgcggtgttcgtcagttactggagcttgattctggctttgaagtggtcgccgaagcgggcgacggcgcaagcgcgatcgatctggcgaatagactggatatcgacgtgatcttgctggatctcaatatgaaaggcatgagtggcctggataccctcaatgccttgcgcagggatggcgttaccgcgcaaattattatcctgaccgtatcagatgcctccagcgatgtctttgcactgatagacgcaggcgcagacggttatctgttgaaagacagcgacccggaagtgttactggaagcaattcgtgccggagcgaaaggcagcaaagtctttagcgaacgcgtcaatcagtacttacgtgaacgtgaaatgtttggcgcggaagaagaccccttcagcgtgctgacagaacgcgagctggatgttctgcacgagctggcacaggggctgtcaaataaacagattgcctcggtgttgaatatttccgagcagacagtaaaagtccatattcgcaatctgctgcgtaaactcaacgtccgctcacgcgtggcggccaccattctgttcctgcaacaacgcggggcacaataaaaatagcccgatggcatcaccatcgggccactttttatttactctcctgcggcgacaaatgttgcatcgcctgcgcgatactacgttcgatcaccgcacggcgagtatcgttggcaggtaagagtttcaacatcatttcccacgcggcaacggcttcgccaaatcgttgctgctcaaaggcattaaatgcatacatgcttaacacacggatattgctatggtccgttctcaccaactggcgcagcagttcgccgccgaggcggttgtcgttgggatcagatgaacgtgtcaacgcttcagcgtatcccagtgcagcatcgctgtttttcggatcgaggcgatacgcagtggcgtatgcatcggtggcgatactggcgttacccagcgccatgccaacgcggcccaacataatccagccttctatatctcccggatttttttgcagttgagtacgcatccccagcgcaaggcgcgacatctcttcttcgttgagcggatcggctttcggatccagcgccctgtccagtaacgccggagcctgtgccgtggcctgctgccagattttcacctgctgataattgccagtctggtagtagctgacgccagccacaattaacgccaccacaatacccggcagataaacaacatatccggcacgcttaccttccggcacgctttgttctggaaacgcttccagcaccacgcgtacccgacgccgcgaacgggcgtatatgacccaaccgccaatgccaatagccactactggcagcacccacagcagcacggtcagcggcgttaacggcggatcgtaagtgacgaagttgccgtaacgcgccaccatataatcgacaatctctttcttacttttgccttcctgcatcagttcatacactttctggcgcaggtcggtggcaatcatcgagttggaatcggcaatgctgttgttctggcatttcgggcagcgcagttcttcagtgagctgacggaactgttgttcctgtgcttcatctttaaactgcaacacgtcgatggtcgccagcgctgagccggagatcatcagcatcagcacgcccaataaaaacctcattgtgcggcctccttactgtatttctcccacagtggcttgatctcttcttcccagacgcgaggattgagatcgcccgcatggcgatagcgaatgatgccgttgccgtcaataaggaacgtttctggcgcgccatagacaccgagatccagccctaacatgccgtcgccatcaaacaggcttagcgcgtaaggattgcccagctctttcagccagctgattgccttctggcgatcgtctttatagttcatgccgaccacgcggatgccctgcgcagaaagctgattcagatattgatgttccgcacggcaggtcggacaccaggtcgcccagacgttaagcagcactggtttgccctgagtcagcacatccgcctgataaaactgccccggattgtccagtgattcgaggcgaaacttcggcactggcttgccaatgagcgccgattccagattggtcggatcatccccttcggcattacgcgccagctgccacagcagcgccgcggcaatcgccaggaagataatcaacggaattaacaataccttgcgcttcatgcagcctccggcgcagttttctgcgggttcacgcgcttacgatagcgaggatcaaacagacacagcagtccgcccaacgccatcatcagcccgcccgcccaaatccagcgaacaaatggtttgtagtaaagacgcacggcccacgcgccgttttccagctcttcaccgagcgccgcgtacaggtcacgcgtgatgccaccgtcaatcgccgcttcggtcatcatcgacccggcagtgttgtaataacgtttttctgcatacagcactgtttccggctttccatctcgcgttacgccgatggtcgccacaccgccacgccagtttggaccagtcacttctttgacatcacggaaggtgaagcgatattcatgaatatcgacgctatcgccggacttcatgcgcacatcacgctcaacgctatagttctgactaaaagcaatgccaacaattgtcactgccagccccaggtgagctgccaccatcccccaataactgaaggtggttttcgtgccgcgtgaaatacgcagcgcagcttccgcaattgccagcaccgcaatccagcaggccattgccaggccgagcaccgtcatcgccacaactttgctttcgaacagccacggcaacagcagcgacagcaccagcgtagagatgaaggcgataatcaacaaattgcggattttacgtgggcgatcgcgtccccagcgcaccagagggccgacaccaagcagtagcgcaaacggcaccatcagccaggtaaacatggtgttgaagaacggttcgccaatcgaaatactgcccagtcccagttgcttgtgcaccagcggcagcaacgtccccagcaacaccaccagcatcgcggcgaccagcaaaacgttgttcgctaacagcaaagattcccgcgaccacagcgcattgtttacgcgtgagcgaactttgtgtccacgcgcggcaaacagcagcagcgaaccgccaatcaccaacaccataaaggcgaggataaacataccgcgcgccggatcagacgcaaacgcgtgtaccgataccagcacgccggaacgcaccaggaaagtccccagcagacacaacgagaaggcactgattgccagcagtaatgtccacgctttgaagctggcgcgttgttcagtgaccgccagtgagtgcatcagcgcagtccccaccagccacggcataaacgaggcgttttctaccggatcccagaaccaccagccgccccagccgagttcgtaataggcccatgcggaaccgagcacaatgccgagcgtcaggaaaatccacgctgccagcgtccacgggcgagtaaaacgcgcataagtgctgtccagacgcccactcagcaaagaagcaatggcaaaagcaaacgccaccgagaaacccacgtaccccatataaagcagaggcggatggaagatcagccccggatcctgcaacagtgggttaagatcacgcccttcaatcgggaaattcggcagcgtgcgtgagaacgggttagaggtaaagagaatgaacagcaaaaagccgacactgaccatccccattatcgccagtacgcgggcaacaatatccagcggaatacgctgactaaaaatcgctaccgcaaaggtccagccgctcatcagtagcacccacagcaggagcgagccttcatgcgcgccccaggtagccgccacgcgataccacaccggaagctgggtattggagttgctggcaacataggtgacggtaaagtcgttgaccacgaaagcattgaccagcaccagaaatgcgccagccacagacataaacagcagccaggcaaacaagcgggaagacgccatcatgcgcgcgtccccgcgcgccacgccccatagcggatacacggacagcagcagcgcaattcctagcgccagacacagcagcccgttaccaatttctggcatcatgatgctgggtccttataaacactcgccgggcgacggtggttagcttccatcgctttctcaacttctggcggcgtgtagttttcatcgtgtttcgccagcacttctttcgcgaggatatgattgcctttttccagttcgccctgcaccacaacgccctgcccttcacggaacagatccggcaaaatgccttcgtaagagacatctactgaaccttcagcgtcgtaaatggtgaaagttacttttagcgaattgggatcgcgctgcacactccccggcatcaccatcccgccaacgcgcagacgctgaccgacttccggcatctgctgagtttcacgcttgccgtagagaatctcccccggcgtataaaagagatcgatattcgagcgcagcgcatatagcaccagaccgatagtcagcgccagccccgccagcacggcacaggcaatccacaagcggtttttacggcgaatattcatgcagcctcctgctgttgcgcagcacgtaaacgcgcctcacgcgcccgctgttgcgccacgccacgcagaattgcgcgatgttgcatcaccgagtgcacgaccaaaaccaccagcggaataacggtcatcaccaccgccaaccagacaaaaaaggcgtaaccgcccattgcgaaaaattcattccaggaagcaaatgcaggggtcatttacggcctcttttcagtatcagttcactcacccacggacggcgtttttccatcagcaaaatcaaattacgcatccgcatcagcgtcagcgtggcagacaggagcaggaagccaaaaatcgaccagcgcagcggcgaacgcatcgccggatcgatactttgctgcatccgcgttgatccctgatgcagggtgttccaccactcaacggagtaatgaataatcggcagattcaccacgccaatcagcaccaggatacctgccgcacggccagccagacgacggtcgtcgaaggcgtgccacagggcaatgacaccaacatacagaaacagcagcaccagttcagaagtcagacgtgcatcccatacccaccaggtgccccacatcggttttccccatgcagagccggtaaccagggcaataaaggtaaacacggcaccaatgggggccatcgccgccaccgccaggttggccattttcatctgccagaccaggccaataaacgctgccaccgccattgatgcataaatgcccatcgaccagatcgccgcaggcacatgcaggtagataatgcggtagctatttccctgctgataatcagccggagcaaagccgaacccccagatccagccgacggtaagcacgaccacactggcaattgccagccacggtataaaccagccacagatttgatacagccgtggtgggatcgccagttgatgcagtgttttccacatagtttcgataccagactcgaacaaaaatcagtaatccagcgttattgaatgctgattcgtaacgctgccgccgtcgcaaaaggacttaatgtcgcggtgcctgccagcaacgcgcctaaaattgccagatacccatcaacgggcaaatgcatagaagccgcgtccatcgcggcggtggcaaagatgagtaatgggatagtcagcggtaacaccagtatgctgagcagcacaccaccgcgcttaagtcccactgtcagcgccacgcccggcgcaccgagaaagccaagcgtaggggttcccagcagcagcgtcagcgccatcacttgccagccataaacatccattcccagtagcattgctaccaggggcgaaaggatgagtaacggcagaccggttaccatccagtgcgccatcaccttcgccagcacaacggcgggcaagggtaacggcaacaacatcaattgttcaagactgccgtcctgcaaatcgtcacggaacagtcgctcgagtgccagcaaggatgaaagcaacgcagcaacccagataatgcccggtgcaatacgcgccagcagttgcggctccggaccgatactgagcggaaaaagggtaatgacaatcaggaagaaccacagcgggttggcgatttcggcgctatggcgaaacgccacgcgcagctcaagacggaaaatgcgccagaacatcatgcggcccccgtttgcgtcagtgaaatgcggcgaattttactttcagcaacgttgagcggctggtgggtagtcagaatcacaatccccccctgctccgtatgctgcgccatacgctgggtcagacgatcgacgccgttaacgtcaatcgcggtaaaaggctcgtcgagtatccataacgtggcacgggtcagccacagacgcgctaaagcgacgcggcgttgttgcccggcagaaagttgatttaccggaatatcttcgaatccggcaagcccggcctgcgccagggcttccagacattgtgcggtatcgccatcgcgatgataaaagtgcagattttctaacgccgtcagccgggttttgatccccggctgatggcctatccataacaggttttgatggtagctgtcgcgtacctgatgcaaaggctgcccttgccagagaacgtcacccgcatcagggcgagacaaccccgtcagcaaacggagaagcgttgtcttccccgcgccgttgctaccggtgatttgtacccactctcctgcgttcagcgtaaatgacaagccactaaataaggttcgttcatcccgctcgcaaagtaactctctggcttcaagcatacccacgcaataaccctgttaaaaacctggctcgacttcgcgcatatcgggcagcttgtgcgctatccctttatggcaatcaatacaggtttgcccatctttcaccgcctggtcatgcatcttcgcggcaaccgatttctgggcggttgtatccatatactcgaagttgtgacagttacggcactcctgcgagttattgtccttcatgcgccgccactcattctgtgccatcgtcaggcgatgagcttcaaatttctgcggcgtgtcaataacgccaaaaattttaccatacagctctttacttgctttgagcttgcgtatcatcttcggcacaaactcgtgcggaacgtgacaatccggacaggtcgcacggacgccgctacggttgttgtagtgcacggaatccatgtattcctgatacaccgtgttacgcatttcgtggcagctaatgcagaactcttcggtattggctttttccatcccggtgttaaagccgccccagaagacgatgccgccgacaaaaccgatcaacagcagcgtccccagcgccagacggctgggggtacgccaccatttccacaggcgcttaatcagaccaggcttacggtcagaatttcccataataacctcttatttcccgtaaccttttgatggggtaaaggtattccccacgattggcgcggtatcggcctgcggtacgtgacattgcagacagaaataacgacgcggagccacttccgcgcccactttgccgtcgctgtccataaagtgagtaggactgatgcgcggcgcgccagtggtgcgatagctttcgacaccgtggcactgcaagcagcggttggtattggtcgttacctgataaccttcaacgctatgcgggatcattggcggctgattcacatagttcagcggcatccgttcctgctcttttggcatccgaatggccccttcctgcgtcccggatacttccggcgactggctaaaatcgacgccattagccgcccaaaccgcgccgctcaccaccagggccagcatcgccgtccattgacacagcgctttcttcaggtcatggcttttcatgatttcgctcccgaactccatcgtgtagttattgtaaatacatcctcagaacagacatccacgcagcgaccgcacgtcatgcaatcgcggctggtgacctgcaccgggctttgttcatccagcaccggggcacgtagcacatgcggttccgggcaaacatgaaaacaatccatacagcggttacatttctgccgatcgctggccgcaacggtaatcacacctttgctacccagcacgccatacagcgcgccaaccggacaaatgtgaccgcaccagccgtgttcaacgaccagtagatcaaataaaaacagcgcgagaataagcagcgcgccgctaccgaagcccattaccaggctgcgccccatcagggaaacggggttgatccattcccagatgagcgtgccggttaaggccgatcccaccagaatgaccaccaacagcacgtagcgaatgtggcgagggatcgtcgcagactgattgaggtcaaagcgcctgcgtaaccagttcgctaagtcggtaatcgggttcagcgggcagacccagctgcaaaataatcgctttcctgccagggcgtagagcacggtgataattaccgcaccagtcagtgctaccgtggcaggcagatgaccgctggcaaggctttgcagcgtcatcagcggatcggtcagcggaacggtgtcgaataacaggctactgctgtagttgccgtgcaagatccacacaccaaaccacggaccgctcaaaaacatccccagcacgaagaactgacaaaggcgacgtaacactaaccaacggtgactgcgccaccagccttttttctccagcgcctcgcgcccggcgtcacgtttacgatttgccattgttcccctccagccagccgaagcggtaatggtgacctaactcccctttcgccagtgacagcggtaacaccttgattgccggttgttccagcacgcacactttttcgcacttaccgcagccggtacaggcgtcgctgtgaaccgtcggcagaaagcgggcgtgcttaccggttcgcgtgttgcgctccagctccagggtgatggcctcatcaattttcgggcattcgcgataacaaacatcgcagcgcagcccctgaaagttgagacagttttcctggtccaccagtaccgccagccccatccgcgcgtcgtcgatcgattcgatctcacgatccagcgcaccgctcgggcacactttggcgcacggaatgtcctcacacatttcgcaaggaatatcccgtgcgacaaaatatggcgtgcccgccgacagaccagaggccagcgtcgccagttttaaggtgtcgtaagggcaagcctgaacacactgaccgcaacgcacacaggcactggcaaaggcgttctcgtttatggctccgggcgggcgcaaccgcacaccagatgcgcgtgcggtttgctgttgtaaccccagcgccacacccacggcagccagcccgcctgctgtgcgaacgacatcgcgcagaaagcggcggcgaccattttgaggtttcgctgaccgggacataatggcttacaccttctccagtttgaccgcgcacttcttgaagtccgtctctttcgagagcggatcggtcgcatccagcgtcagtttgttaaccagctgtgcggcgtcgaagaacggcatgtacaccaggccctgcggcggacggttacgaccgcgcgtttcgacaatcgagatcacttcgccacggcgagaaaccactttcactttgtcgccacggcgcagatcgcgcgctttcgcatccagcgggtgaataaacagaaccgcttccgggaaggcgcggtgcagttccggtacacggcgagtcatactgccggtatgccagtgctccaggacgcgtccggtagagagccacaggtcgtactcttcatccggtgcttccgccgcaggttcgaacggcagcgcgaagatcaccgctttgccatccggtttaccgtagaacttgtagccttcgcccgctttcacgtacgggtcgttaccttcgctgtaacgccactgcgtttctttaccgttcaccaccggccagcgcagaccgcgtgctttgtggtaatcatcgaacggcgcgagatcgtgaccgtgaccgcgaccaaaccatgcgtactcttcgaacagccctttttgcagatagaagcccagctcgcgggattcatcgttcagctgatcttccgccagttcggataccgggaatttgctcacttccggagtggcatacagaacttcgtacagcgttttgccgcgcagttctggtttcttcgccagcaactcttccggccacacttcttcagttttgaagcgacgggagaactgaactaactgccagagatccgattttgcttcacccggtgcctgtacctgctgacgccagaactgagtacggcgttcggcattaccgtaagcgccctctttctctacccacattgcggtcggcaggatcaagtcggctgccagcgcactgactgtcggatacggatcggaaacgatgataaagttgcgcggatcgcgccagcccggcatacgctcttcattaatgttcggtccggcctgcatgttattggtacacatggtccagtaaacattcagtttgccgtctttcagcgcacggtcttgtgccaccgcgtgcagaccgattttcgccggaatggtgccactcgggatattccacttcttctcgcaaatatcacgatgtttctcgttagtcaccaccatgtccgcaggcagacggtgagcaaaggtgcccacttcacgcgcagtaccacacgcggaaggctgcccggtcagggagaacggaccgcaacccggctgggaaattttgccggtcagcaggtgcaggttgtagaccaggttgttggcccacacaccacgggtatgctggttgaagcccatcgtccagtaggagatgactttcttgttcggatcggcatacagctgcgccagttgttctaactggtctttcggcacgccggtcatttcggcggttttttccagcgtatattcagcaacgaaggctttgtaatcttcaaagctcatcggttcggaggcgtcagaacccggattcttcgctgctttttccagcggatgggtcggacgtaaaccgtagccgatgtccgtcgctcctttgcgcaggttaacgtgtttgctgaagaagtcctgatttatcgcattgttttgaatgatatagttggcgatatagttcaggatcaccaggtcagattgcggcgtaaagatgatgccgttatccgccagctcgaagctacgatgctggtaggtagaaagcaccgccacggtaacgttctggttagagagacgacggttagtgatgcgcgaccagaggatcgggtgcatctccgccatgtttgcgccccacagcacaaacgcgtcagcctgctcgatgtcgtcgtagcagcccatcggctcatccataccaaaggtacgcataaagccaactactgccgacgccatacagtgacgcgcgttcgggtcgatgttgttcgaacggaagcccgctttgaacaacttggacgcggcataaccttcccagatagtccactgaccagaaccgaacataccgatcgattccggccctttttctttcagggcagtcttaaatttctcttccatcacatcgaaggcctgatcccaggtgattggggtaaattcgccttctttgtcatatttaccgtttttcatacgcagcagcggctgcgtcaaacggtctttaccgtacatgattttgggcaggaaatagcccttaatgcagttcaggccacggttaaccggtgcgtccgggtcgccctgacaggccaccacacgcccctgctgcgttccgaccagaacgccgcaacccgtaccgcagaaacggcacggcgctttatcccatttaatggcttcctgctgaccaacaacggcgcgggcaacgcccggcacgctgaaaccggcagccgccgcagcggccgcaacggcgttagctttcataaagctacgacgactgagtttcatggtgtttcctcaccttgctcttcctgctggtgataaaccagcgacaccgccagcacgccctctacgttgcgtactgactcaatggtttggatcagcgtttcgctgtcttctgcttccaccaccacaatcaactgaccgctcggcgcgtcgctgacagcaacttcacagccggtaaaggcgttcagttgggtgctgatgtctgaaattcgttcgcttttggcctgcacgaccaggctgcaaacttgccagttagtgtgcatggagatactccgcagttatggctgataccggacagctggctgcacatgctccacatccgttgcaaagttggctattaagttgcggctggtagatcccggagagcgtcgggcgaaagataattgccattggctcacagctatcctgacagcggcggcattcaactgactgatacgccaggcacgcgtccccaatggtgaactgcaaatcccaggccctggtgtggcgcggagaaaatagcgattcggggcaagcctgcgcgcaggcgtaacagaagctgcactcgttatttttgaaattaacgctcggatagccacccgcgccgcgttgcagaatgttgttttcacaagcattaatacaggcgtcgcagcgggtgcaatgggtcagaaaatgagattcatcaccggaccagggcggacggataccgttactggctttgcgccagcgaccagtgagtatgccccgacgggatgcatcaatcttcacattgaccttccatcattaacgcgctctgaaaattgagagcgaccaaataaaccgcataattaataagccatttttatagccgctaagatattaaaggatgtgtcaaagatgcataccccgatcggggtaaaacctgtagcaggatcaaaagagtggcgggaagcgtggcaaaaacgggcttttgctcacatttcaaatggttataaacatatttatatagcgattaattcgccagagatatttctgctggtttgttttctcatcagaatttaacactaaaagagcaggtaaaattatctgaatgttctttaagttattcataaagcaaattaataaatctgatgaatatgttaaccttcagcgacatcatcggtgaaaacctataaatgaagaaggaaagcaaaaaaatgaagaccattctacctgcagtattgtttgccgctttcgccaccacttccgcctgggcggcagaaagcgtccagccactggaaaaaatcgcaccttatccacaagctgaaaaaggcatgaagcgtcaggtgattcagttaactccgcaagaagatgaatctaccctgaaagtagaactgttaatcggtcagacgctggaagtcgactgcaatttgcatcgtctcggcgggaagctggaaagcaaaacgctggaaggctggggctatgattattatgtctttgataaagttagctcgccggtttccacgatgatggcctgcccggatggcaagaaagagaagaaatttgtcaccgcgtatctgggcgatgctggaatgctgcgttacaacagcaagctgccgatcgtggtgtatacgccagacaatgtggatgtgaagtaccgcgtctggaaggcggaagagaaaattgacaacgcggttgtccgctaaactgctgtgaagtgctgcaacctgtaggccgaataaggcggttacgccgcatccgacatctaacgcccgagccggttgcctgatgcgacgctgaagcgtcttatcagcatacgccacatccggcaaaccatgccggatgtggcacatcattacaacgcaatatccgccacttctttttgaacgagttgcggtttcaactgcggtttcggcgtactatctactgcctgcggcttgtcgtatttcagccccagcacttcgctggtgtactgcaactcgcgttctgttgccgctacatcaccgttcagcttgcgtccataagacggaacgatcgctttcaacgtagcctgccattgcgggctggaaacgcgatcgccaaatactttttccagcagattcaacataatcggcgcggcggttgacgcccctggcgatgcccccaggagcgcggcaatggtcccttgctggtcactgacgacttcagtacccagacgcagtacgccacctttatcggcatcacgcttgataatctgcacgcgctgccccgcttgccacaaacgccagtcctcttttttcgcctgcggatagtactctttcaacgcttcaaaacgatcctcttcactcaacatcacctgactcaccagatatttcaccagatcgaaattatccagcccgacgtgcatcatcggcatcacgttagaggtggtggtggaactcatcagatcccacaatgaaccgtttttgaggaatttagttgagaaggtggcaaatggcccaaacaacacgacgcgtttaccgtccagcacacgggtatcgatatgcggaaccgacatcggtggtgcgccaacggatgctttaccgtaaaccttcgccagatggtgattaaccacgtccggattttccgaaacaaggaactgtccgcccaccgggaaaccggcgtagtctttcgcttccggaatccccgattcctgtaacagcttcagcgccgcaccgcccgcgccgataaagacaaatttggcgcggatgttctgtgcagtgccatttttcagatcggcaacggtaacggtccaggtgttatcgtcattacgctttagggcgcggacttcgctgctgagttgcagcgaaaaattagatttcttctgcaaggaagcaattaactggcgggtgatctcgccatagttcacatcagtgccaatttccgtacgcgtggctgccactttctgttgcggatcgcgcccttccatcactaacggtgcccactctttgatctgcgcgtgatcttcagagtaacgcataccgcgaaacagcgagctttgttgcaacgcggcgtaacgggctcgcaggaaattaacgttatcctcgccccagacaaagctcatatgcggaacggtattgataaatgaacgcggtgtacgcagcacgccgcgctcgacctggtgcgcccagaactggcgcgaaatctgaaatgcttcgttaatggcgactgctttttcaatactgatgctgccatcggcgttttgcggggtgtagttcagttccatcagtgcagaatgcccggttccggcgttgttccagccgttcgaactctcctgcgcgacaccttccaggcgctccaccatggtcatcgaccattcaggctccagctcgcgtaaataggtccccaacgtggcgctcataatgccgccgccaatcaacagtacatcagtttcctgctcctcggacgctttcgcttttgccgccatcgaaacggcattaagccccacggccatcgagaagagcatggcagtcacttttttcatcttgttaatgccttacttttagtcgctttattgcaggtgagatttgcgcggcatcaacggtaacacttaagtaacaacatttaaataatgtttataaattatattctaattttagaaacattataatttcgttgattaattatagggttattagaaacgaaggtatttttagaatattgacctggcggcagcagtccgccaggtcagcgtcgaaatattatgccgtccgggcaacggcatcacgcgaagcagcatcgcgctcttcgcctgtcagctcgctaagttgcccgttgcgcatttccagcaggcggtcggcgtggataaagtaatgatcatcatgactgatggcgaaaatagttttacccatctcctgcatcagcggcagcagcacctgataaaactcacgacggaagtgtggatcctgatccgccgcccattcatccagcaggataatatcgcgttcttctgccagcgccagcaacagcgccacgcgttttttctgcccttttgataacttcaggttaacaatacgcccgttgcttaactcaagcttatgagccattttcagctgcgccagccacttctcaaccagttgcgggttagcgggttgcccctccggccccagcagttgatcaaacagccagacatcggtaaacactgccgaaaacagtttgcgataatcttccggttgttcgccgctgacaggtttgccatccagcaagatttcgccgctttgtggttggtacaagcccgtcagcaacatcgccagcgtcgattttccactaccgttgccaccaatcagaaacagcagttcaccacgtttgatggtgaggttaatcggcccaacggaaaacgcgttatcctgataagcaaacgtcacgttacgcagctccagcgtttgccagttgggaaaagcctgcgggcgcggaaactctgctttgaaaggcgcgagcgcgaatttgttcagcttgttaaacgccacctgcgccgtcagcagcgtcggcaatgcgccaaccgccgaaagcagcggcgtacgcaggaataacagcgtcaacgaataggtcgcagcaacgttggtatcagcccaaccgagactgttcgccatccagaacaccaggccgatagcgcccagcatcatgatgtttgaccagttcacggcactaagatggaaggtgtctgcgcgaataatatgatggcgatactcttgcgcatcaggaatgtagaggttgttaaacacatactcggcgcgttcacggttcagagtcagctctttgcgcccttcgagtacagtttgaaaatccgtgtacagcttatcttcggtttcacgcagggtcgccatatgtttgtacacccgcgccaccagcacaaaaccgccccagatggtgactgccatccagatagccgttaccagcaacattttgcccgacagcatccacaaatacgccgctgaaccgatagtgagaatgatcccctgcaccagttccggcagacgcacaaaagcaatggtgatattgcgcacatcgctggttaaccccgccagcaacgaagcgctaccaagttgttcaatgcgctcgacgtgggtatccagaatccgcttgataaattcactacgcagtcggtaaacgaagtgatgccccaaagtggtgagcgccagttgcgatccgagagtgactgccatcaacagcaacaataatcccagaaactccggcaacaccagcagactggtatccgccgtttcgataaggcgctgattgataaaagcaattaagccaatgcctaatgccgcactggcgaggcttagcgccatcacactgataaatggccagcgatactgccgccagacaagtacaagaagttccatgcagaaaacccggacaatgaattacagcccgcagtttaaacatcttcgcgcgcacagcaataataattcttatttttattcttttttacctgcctgacggaatgtcaggttgtagcggcagtcggtggtgagtggatgaaaccccgctttcaacggttgaataccgtgataaaacagccgcgattcaccgccccataccaccacatcgccatgttccagcaacaatctttttagcggatcatttcgtttcaggccgccaaattgaaaaatcgcgggtaagcccagagaaacagaaacaatcggcgcgcgcagatccggttcgtctttatcctgatgcagcgacagtttcgcgccaggagcgtagcggttgataagacaagcatctggctggaaatctggatagcccgccgccgtagccgcacgttgacataaattatgaaaactctgcggcatggcgggccacggtttatttgtttgcggatcaatgggcgaatagagataaccctgccgatgggtggtccagcccagacgcccgcagttggtcatcgccaccgacatggtatatccgcctggagtgaccatctggcgaaacggcgactggctggcaacgtcattaatatcgcggatcagttgctccgcagcgttaaaagcaaaacggtgcaaaatcaccgctccagccgccagtggttcttgccacggttcagcatcggcaaacagatccaacattacctctcctcattttcaacttcgcggcgcagcagttgcgctttgcgcgacacgccccagcggtaaccggaaagtgagccatcaccacggaccacccgatgacaaggtataacgatagcgagcttgttggcggcacaggcgctggcaacggcccgtaccgctttcggtttgccgatggcgttcgccagttgctgataactgacggtttcaccacaaggtatcgtgcgcagtgcctgccagacttgttgctgaaaagcagtgccgcgaatatccagcggtaacgtcagcggcgtatcgcgttgattgaggctggcgatcacttcacgcacatgttgctgaaacgtcagatcggcaggcgcgttgtcggcagcgggaaacatctgctgcaactcgctgattaatgtcgcatcatcatcgcccaacaatatcgcgcaaatcccccgctcgctttctgccaccaggcaacggcccagctcacaatcagccagcgcgtaacgcaccgccagattttcgccaccgtgacggaattgtttagccgtcatgcccagcgtttcatcggctttacggtagtaactgctgccgtcggggaatccggcactgagaatcgcctgagtcacgctctccccttttgccagagactcccgcaatcggcgagcacgccaggcctgctgccaggctttcggcgtcattccggtagtcgctttaaacaatctatgcaaatggaacggactcatcgccagctgttcggctaaggattccagcgttacaggcgtttcctgttccagcagtcggcaggcgtgggtgattttatcaaggcgatgttgttggggattggctttgtctggctgacaacgtttgcaggggcgaaagccagcggcaagcgcctcactggcatcggcatagaaagaaacgttttcccgcaaagcatgtctggcgcggcaagacggacggcaaaagatgcctgtggtgcgcacggcgaaaacgaattcgccgtcggcattcgggtcgcgggctaagacagattgccagcgttgatcgtcagttaagcatgtggcgtttttcataatcagctccctggttaaggatagcctttagtctgcccggtcaccatcacgcaaaaaccaacaatcttgcgctttaatttttttcgctgataaggaagcttttaaactgcggcgacatccaggttttaaagctatcgccctctttggtgatcatataaaccgccagcccttcccggcgaacgacttctttggctttctctggcccgagcaccattaagccagtatcccaggcgtcggcttccagcgccgtcggggcaatcaccgtcacggataccagattgtgttcgatgggacgcccggtttgcggatcgataacatgggaaaggcgtttgccgtccagttcgtaatagttacggtagctgccagaggtgctaatgccatgaccgttgatatccaccacggcctgaaccgcgttttctttatcggttggtttttgaatcgctacccgccacggctggccttcaccgttcatgccacggctgttcagcgcgccgcccaccgacaccagatagcgggaaatcccttcctgctccatcaagcgtgccagatgatccgccgcatagccttcgccgacagtggagagatcgacatataaatccggcaggtttttttgcagatattgctgatgcgactgattaatgaccgtcaggtgctgtaagccggttttggctttcatcgcatcgatctgttcctggctcggaatttgaaccggctgttgttccgggccaaagccccacagattcaccagcggcccgacggttatatccatcgcaccatcggtccttgcgccaatgcgcagcgaggtggtgacgatatcggccatcgcttcacttaccggccacggcgacaaactttgcgagtcgttaaagcgcatcagcgcggaatcttttttataggtcgaaagcagctgatcgtcggcgtccagctgggtctgaatcttttctttaagttcggcactgcgtttggcatcaatgcccgggatgctggcacgccagaaggtacccatggttttgccttcaagaacggtaacttcagtagcgtgggttttggcgggttgtggtttttgatcgcaaccaacaaagaagagcgcggcagccagcagtgccacgcgggtaaagcttatttccatacgtgattatcctcatgcgaacggtcgcaagagtacaccaaaaaactgtgtttgtacgctgaaaacaatgaaaaaagggcccgcaggccctttgttcgatataaatcgagattagaactggtaaaccagacccagagctacgatgtcatcagtgttgatgccagcagcgcgggtgaactggttgtcgtccagcaggttgattttgtagtcaacgtaggtggacatgtttttgttgaagtagtaggtagcaccaacatcaacatatttcaggatatcttcgtcgtcgtagttacgaccagcaacgacacccaggtttttacctttagactgcaggtatgctacagacggacgcagaccaaagtcgaactggtactgagcaacagcttcgaagttctgtgctttgttcgcccaacccagggaacctacgcgagttgcgttgtaggtctgggtgtactgagcagccaggtagatgttgttagcgtcgtatttcagaccaccagtgtaggtttcagcacggtcgccagtaccgatcaggccagtgttgttctgatcccaggtacgtttggagctggaaactgcagcaccaacgccgaagccttcgtaatcataagtgatagatccgccgacaccgtcgccgttctgacgcagagctttacgaccattgttggtgatgccatgaccagtgaaatccggatcattttcaccgcttacgctgccattctggccctggtactgaacagcaaagttcaggccgtcaaccagaccgaagaagtcggtgttacggtaggtcgcgaagccgttaccacgctgctgcatgaagttgtcagaaccgtaggtgtcgccaccgaattctggcagaacgtcggtccaggaagttacgtcgtaaacaacgccgtagttacgaccgtagtcgaaagaaccgatgtcctggaatttcagaccagcaaatgccacacgggtccaggagttgttttcgctttccggagcgttgccctggatctgatattcccactggccgtaaccggtcagctggtcagtaacctgagtttcacctttgaagccaagacgcatgtaggtctggtcgccatctacagacttgtcgtcagagaaatagtgcaggccgtctactttaccgtacagatctaatttgttgccgtctttattgtaaacttcagcagcgtttgctgcgcctgctaccagcagagctgggaccaggagggacagtactttaactttcatgttattaaccctctgttatatgcctttatttgcttttttatgccactgcatactgattaaccctcattaatcagtcggcaggtccattctccccaaaaatgcagaataatccaacacgaatatgatactaaaacttttaagatgtttcatttatcgctatagatgtttcaaaatgtaaatacaagggaactttttaagattattgcggaatggcgaaataagcacctaacatcaagcaataataattcaaggttaaaatcaataacttattcttaattatttgacagcactgaatgtcaaaacaaaaccttcactcgcaactagaatatcttccgctatcatcattaactttatttattaccgtcattcatttctgaatgtctgtttacccctatttcaaccggatgcctcgcatccggttttttttacccttctttacacacttttcattattctgtgctaccacagaaaaactataacgcctgttaactatttcacaaataattaacataggcataatttccagcaatcttcgtttatttgcaattaatatcgttaggctttttgtaggttatttgtacagcaaaatggcgcttgtacatctatttcacccaatgcaggatgataaatatcactggagaatagagaatcatcaatcaggtaagagtctggaatttcacactgtaccctttatactgccctatcacttcgcgaagttttaacaggtcataaacacgaatgcgtcagaaagagacaacggccacgacccgcttttcactcctaccggggagcattacccgcttctttttactgttgatcattgtgttactggtgacgatgggtgtaatggtacaaagcgccgttaacgcctggctgaaagataaaagttaccagattgtcgacattacccacgcaatccaaaagcgcgtcgatacctggcgttacgtgacctggcagatctacgacaacattgccgcgacgacctccccctcctccggcgaaggtttacaagagacgcgcctgaaacaggatgtctactatctggaaaaaccacgccgcaaaacggaagccttaatctttggctctcacgacaactcaacgcttgagatgactcaacggatgtccacctatctggacacattgtggggcgcagaaaatgtaccgtggtcgatgtattacctgaatggtcaggataacagtctggtgctgatctcaaccctgcccctcaaagatctcacctccggatttaaagaatcgaccgtcagcgacattgttgattcacgtcgtgcagagatgttgcaacaggccaacgccctcgatgaacgcgaaagtttttctaacatgcgccgcctggcctggcagaacggtcattactttaccttgcgtaccacgttcaaccagccgggacatctggcaacggtcgtggcttttgatctgccgattaatgatttgatcccaccgggtatgccgctggacagtttccgccttgagccagacgcgacggcaacgggaaacaatgaaaatgagaaagaagggacggatagcgtcagtatccactttaacagtacgaagattgaaatctcctcggcactcaactctaccgatatgcgcctggtctggcaggttccttacggcaccttactgctggatacgttgcaaaacattctgctgccactgctgctgaacatcggtttgctggcgctggcgttatttggctataccacattccgccatttctccagccgcagtacagaaagcgtccccagcacggcggtcaataacgaattgcgcattttacgggcaattaatgaagagatagtctcactgctgccgctcggcctgctggttcacgatcaggaatcgaaccgcacagtcataagtaacaaaattgccgatcatttgctgccgcatttgaatctgcaaaacatcaccaccatggcggaacagcatcaggggattattcaggcgacgatcaataacgagctgtatgagatccgcatgtttcgcagccaggttgcgccgcgcacacaaattttcattattcgcgatcaggatcgcgaagtgctggtaaacaagaaactcaagcaggcgcagcgtctgtatgagaaaaaccagcaggggcggatgacctttatgaaaaacattggcgatgcgctgaaagaacccgcacagtccctggcggagagcgcggctaaactcaacgccccggaaggcaaacaactggcgaatcaggcagatgtgctggtgcggctggtcgatgaaatacagttagcgaacatgcttgcggacgatagctggaaaagtgagacggagctgttctccgtgcaggatttaattgatgaagttgtgccttcagtgttgcctgccatcaagcgtaaaggtctgcaactgctgattaacaatcatctgaaagcacacgatatgcgccgcggcgatcgcgatgccttacgacgtattttgctgctactgatgcaatatgccgtgacctcaacgcaattgggaaaaatcacccttgaggttgatcaggatgagtcctccgaagaccgcctgacgttccgcattctggacactggagaaggcgtaagcattcatgaaatggataatttgcacttcccgtttatcaaccagacccaaaacgatcgctatggcaaggcggacccgctggcattctggctgagcgatcaactggcgcgtaaactgggcggtcatttaaacatcaaaacgcgggatgggcttggtacacgctactctgtgcatatcaaaatgctcgcagctgacccggaagttgaagaggaagaagagcgattactggatgatgtctgcgtaatggtggatgttacttcggcagaaattcggaatattgtcactcgccagttagaaaattggggtgcaacctgtatcacacccgatgaaagattaattagtcaagattatgatatctttttaacggataatccgtctaatcttactgcctctggcttgcttttaagcgatgatgagtctggcgtacgggaaattgggcctggtcaattgtgcgtcaatttcaatatgagcaacgctatgcaggaagcggtcttacaattaattgaagtgcaactggcgcaggaagaggtgacagaatcgcctctgggcggagatgaaaatgcgcaactccatgccagcggctattatgcgctctttgtagacacagtaccggatgatgttaagaggctatatactgaagcagcaaccagtgactttgctgcgttagcccaaacggctcatcgtcttaaaggcgtatttgccatgctaaatctggtacccggcaagcagttatgtgaaacgctggaacatctgattcgtgagaaggatgttccaggaatagaaaaatacatcagcgacattgacagttatgtcaagagcttgctgtagcaaggtagcctattacatgaacaatatgaacgtaattattgccgatgaccatccgatagtcttgttcggtattcgcaaatcacttgagcaaattgagtgggtgaatgttgtcggcgaatttgaagactctacagcactgatcaacaacttgccgaaactggatgcacatgtgttgattaccgatctctccatgcctggcgataagtacggcgatggcattaccttaatcaagtacatcaagcgccatttcccaagcctgtcgatcattgttctgaccatgaacaacaacccggcgattcttagtgcggtattggatctggatatcgaagggatcgtgctgaaacaaggtgcaccgaccgatttgccgaaggctctcgccgcgctgcagaaagggaagaaatttaccccggaaagcgtttctcgcctgttggaaaaaatcagtgctggtggttacggtgacaagcgtctctcgccaaaagagagtgaagttctgcgcctgtttgcggaaggcttcctggtgaccgagatcgctaaaaagctgaaccgcagtattaaaaccatcagtagccagaagaaatctgcgatgatgaagctgggtgtcgagaacgatattgctctgctgaattatctctcttctgtgacgttaagtccggcagataaagactaatcacctgtaggccagataagacgcgtcagtgtcttatctggcatttgcacggattgccggatgcggcgtaaacgccttatccgtcctacgattcccgcgatttcctgaccctctcggcatataccgtcagcgtctgttttatcacatccagcgttaccggcttcgacaggcagctgtccataccggactccagacaccgctgcttctcttcagccaacgcattagcagttactccgattaccggcaacgtcagtcccaactgacgaatgcgttgcgtcaagcggtaaccatccatatttggcatattgacgtcgctaagcacgatatcaatatgattcttgttaagtacattaagcgcatcgacgccatcattcgcggttttacattgatagcccaacgatcccaactgatctgccagcagacgccggttaatcggatgatcatccacgaccagaatcatcatatcgtcattatcgctgaccgctttgtccgtcgacggcagagcgttagcaggatcgtcgctctccatctcgatcaaataaatacgcgccaacaatgccggtagctcatgcggagcagccacactgtgtacccactcccctggcgctttctccagcggaataccaatatggcgacgacagaaggtcactaccgctctgccctgccattttttgttcactacctcgtcagtaattaacacatcttcgggagtcggttcctgcccttcgtatgttgtaacgacgatgccgctgcgctgcaaactggtttccaggaactgacagagcgacgcattgcggaccgccagccagcagcgtttaccactcaacccttccacaccttttttctgcgggtactgagcgccatacaacggaatacgcacggtaaactggctgcccattcccggttctgaatctaccgagatgtcgccgtccatcatgctgatcagtttttcacaaatcgccagacccagaccagtcccctggaagttacgctgtacgcccgttccgacctggaagaagggatcaaacaaacgcaccacttcttttgccggaatccccacgccggtatcgcgaacacggatagagagataatcgccatcagcgcgaacatgcaaaactatacagccggtatcggtgaattttatggcgttactcagcaggttagagatgacctgttgtaaacgcatcgggtcgccatttaaggccactggcacatccggttcaataaagcagtacaagcctaactgcttgcgtaccaccagcggtaaatagttggcggtgatgtggttcatcacttcacgcggtgaaaactcacgcggttcgatcttcaactgttctgattcaattttcgagaaatcgagaatatcgctgataattttcaacaacaggctggaagagttgttcattgccgtcaccagacgatcgacgcctttcggtaactctttggtttgcaacagatccaggttaccgataatgccatacagcggcgttcgcagctcatgactgacggtggccaggaacatcgattttgactggctcgcctgttccgctgcttgtgccatctcctgcaacgactcttccatcttcacgcgcgaagaaacatccaccagcacacaaatggccacgttttcattacgatagcgcgaatggacgaagctgatttgcagattggtattgttgctggtcaggacatcaacaaaattgacctgctgcccacagataatttgtgtcagccgttggcggtcctcatgcgtaagcatattgagataggtatgcgccagttcgttacttaaaatattgacgccatcagcggtacgcaaaatgcagatacccactggcgcggaggcgacaatcttgcgattaaattgctcatgttcttccagtcgcagggcgtcgctttccgccggaatgaaaatacgccgctcgtacatccgcgcgagagtaaacaatgcagctccggcaagcacattcagcaaaattgcgttaaggatcaacatgcgaatgcgttccagcaccttatcaactggcactgaataaacgatgcttagcgatgagggtggcagatttttcttcagcaccagttcccggaacccttccgtatagccaaaccaggagcgttcctgcatccagcgaggatcgcccttaattttgctttctggtccggtaagcgaaatcagggtatgaccattttcatcaagaatggtaacccccatcggcaacgtaccaggtaagaaaaagttctccatccggatggtttgctcgacacccaaaagcgcctgcaaccggttcgccagataaactggcgtcaaggcgtaaaaatacccgacgccagggcgcggaccttcgctgatccagtagaggttactgccactatcatcttgtggtgcatttcgatatttattaatgcgttcatgcaaagcttttagcgcggtatcgcgttccactggcatatcacgcagaccgaaattggccatgcagaggttatcgctgccgattaaaaatacccggtttagatcgtaagccgcagaaaaattatcgcgccagtagcgcataaaccacgccaatgactccagagaacctcgccaggtgttactcattgcggaacaatcagagtcagcaaacagcggttcaaacgcaggcacatccgtctgcgtttctcgtccacgcggggaaagcacaccgttttctgccgataagcgattttcagctatgtacttcagctctttcatcacatcagaggtgcgttgaataaagcgctgagcctgatcggaactcagattaaattcctgacgaatttccgattctcgctgatgtaacgcattaacgatgtaaaaaacggatgaaaaagcaatcaacagccagagcactaacgccaatgctctgaacatgtagcgcgaggctttcagggttgtacgaaaagaagcaaggtatttcaaaggggcgaagctccgcctcaggtgaccgatggagtgtggttaaggtagcggtaaaagcgtgttaccgcaatgttctctcttctctggaatatgatacaccgccgagaaatcatcaccttaacctctgataatcgtcatataccggacaagactagtggatttcagcatgcattatatgaagtggatttatccacgccgcttacgcaatcaaatgatcctgatggcaatcctgatggtcattgtcccaacgcttactattggttatatcgtagaaacggaaggacgttcagcagtcttatctgaaaaagagaaaaaactttctgccgtggtcaacctgcttaatcaggcgctaggcaatcgctacgatctctacatcgacttaccgcgtgaggagcgtatccgcgcattaaatgcagaacttgcccccattaccgaaaatatcactcacgccttccctggcatcggcgctggttattacaacaaaacgctggatgcgataatcacctacgcgccttcagcgctatatcagaataatgtgggcgttaccattgccgcagatcaccctggtcgcgaagtcatgcgtacaaatacccctttggtttattcaggcaggcaggtgcgcggcgatattttgaattcaatgattcccattgagcgtaatggtgaaatcctcggctatatctgggccaatgaattaaccgaagatattcgtcgccaggcctggaaaatggatgcgaggattatcattgtgctcaccgccggtttgctgataagcctgctgttgattgtccttttctcccgtcgcctgagcgccaatatagatatcatcaccgatggcctctcgactctggctcaaaatattcccactcgattaccacaattgcccggtgaaatggggcaaatcagtcagagtgttaacaacctcgcccaggcactgcgtgaaacgcgaacacttaacgatctgattattgaaaacgctgccgatggcgtcattgccattgaccgccagggtgatgtaaccaccatgaacccagcagcagaagtcatcactggctatcaacgtcatgaactggtagggcagccttactccatgttgttcgacaatactcagttctacagtcccgtactggatacgctggaacatggcaccgaacatgtagcgttggagatcagttttccaggccgtgaccgcaccattgaactcagtgtcacgaccagtcgtattcataacacgcacggtgaaatgataggtgctttggtgattttctctgatttaactgcccgcaaagaaacccagcgccgcatggcgcaagcagaacgcctcgccacactgggtgagctgatggctggcgtggcgcatgaagtacgtaatccgttaacggctattcgtggttatgtacagatcttgcgccaacaaacccgtgacccaatacatcaggaatatctgtccgtagtactcaaagaaatcgattcaattaacaaagttattcagcaattgctcgaattttcacgcccacgccacagtcaatggcaacaagtcagcctcaatgcattggttgaagaaactctggtactggtacaaaccgccggcgtacaagcgcgggtcgacttcataagcgaactggataatgaattaagcccgattaacgccgatcgtgaactgctcaaacaggtactactgaatatcctgatcaatgccgtccaggctatcagtgcacgagggaaaattcgtattcgaacctggcagtatagcgactcgcaacaggccatttcgatagaggacaacggcagtggcattgatctctcgctgcaaaaaaagatcttcgatccctttttcactaccaaagcctcaggaaccgggcttggtctggcgttaagtcaacgcatcattaatgcccatcagggtgatattcgcgtcgccagtttgccgggctacggcgcaaccttcacgcttattttaccgatcaacccgcagggaaatcagactgtatgactgctattaatcgcatccttattgtggatgatgaagataatgttcgccgtatgctgagcaccgcttttgcactacaaggattcgaaacacattgtgcgaacaacgggcgcacagcattacacctgtttgccgatattcaccctgacgtggtgttgatggatatccgcatgccagagatggacggcatcaaggcactaaaggagatgcgcagccatgagacccggacacccgttattctgatgacggcctatgctgaagtggaaaccgccgtcgaagcactacgctgcggagccttcgactatgttatcaaaccgtttgatctcgatgagttgaatttaatcgttcagcgcgctttacaactccagtcaatgaaaaaagagatccgtcatctgcaccaggcactgagcaccagctggcaatgggggcacattctcaccaacagcccggcgatgatggacatctgcaaagacaccgccaaaattgccctttctcaggccagcgtcttgattagcggtgaaagcggcaccgggaaagagttgattgccagagcgattcactacaattcgcggcgggcaaaggggccgttcattaaagtcaactgcgcggcactgccggaatcgttgctcgaaagtgaactgtttggtcatgaaaaaggtgcatttactggtgcacaaaccttgcgtcagggattatttgaacgtgccaacgaaggtactctgctcctcgacgaaattggcgaaatgccgctggtactgcaagccaaattactacgcattctgcaggaacgggaatttgaacggattggcggccatcagaccataaaagttgatatccgcatcattgctgccaccaaccgcgacttgcaggcaatggtgaaagaaggcaccttccgtgaagatctcttttatcgccttaacgttattcatttaatactgccgcctctgcgcgatcgccgggaagatatttccctgttagctaatcactttttgcaaaaattcagtagtgagaatcagcgcgatattatcgacatcgatccgatggcaatgtcactgcttaccgcctggtcatggccgggaaatattcgagagctttccaacgttattgaacgcgccgtcgtgatgaattcaggcccgatcattttttctgaggatcttccgccgcagattcgtcagccagtctgtaatgctggtgaagcaaaaacagcccctgtcggtgagcgtaatttaaaagaggaaattaaacgcgtcgaaaaacgcatcattatggaagtgctggaacaacaagaaggaaaccgaacccgcactgctttaatgctgggcatcagtcgccgtgcattgatgtataaactccaggaatacggtatcgatccggcggatgtataacgccaaaacttgctatgcagaaatttgcacagtgcgcaattttctgcatagccgctcattctccttatgaatccccatctaatttatccttttctattcaattagttaaataacaacattcaataatctcattctggcactccccttgctattccctgactgtacccacaacggtgtatgcaagagggataaaaaatgaaaacaaaattgatgacattacaagacgccaccggcttctttcgtgacggcatgaccatcatggtgggcggatttatggggattggcactccatcccgcctggttgaagcattactggaatctggtgttcgcgacctgacattgatagccaatgataccgcgtttgttgataccggcatcggtccgctcatcgtcaatggtcgagtccgcaaagtgattgcttcacatatcggcaccaacccggaaacaggtcggcgcatgatatctggtgagatggacgtcgttctggtgccgcaaggtacgctaatcgagcaaattcgctgtggtggagctggacttggtggttttctcaccccaactggtgtcggcaccgtcgtagaggaaggcaaacagacactgacactcgacggtaaaacctggctgctcgaacgcccgctgcgcgccgacctggcgctaattcgcgctcatcgttgcgacacacttggcaacctgacctatcaccttagcgcccgcaactttaaccccctgatagcccttgcggctgatatcacgctggtagagccggatgaactggtcgaaaccggcgagctgcaacctgaccatattgtcacacctggtgccgttatcgaccacatcatcgtttcacaggagagcaaataatggatgcgaaacaacgtattgcgcgccgtgtggcgcaagagcttcgtgatggtgacatcgttaacttaggaatcggtttacccacaatggtcgccaattatttaccggagggtattcatatcactctgcaatcggaaaacggcttcctcggtttaggcccggtcacaacagcgcatcccgatctggtgaacgctggcggacaaccgtgcggcattttacccggtgcagccatgtttgatagcgccatgtcatttgcgctaatccgtggcggtcatattgatgcctgcgtgctcggcggtttgcaagtagacgaagaagcaaacctcgcgaactgggtagtgcctgggaaaatggtgcccggtatgggtggcgcgatggatctggtgaccgggtcgcgcaaagtgatcatcgccatggaacattgcgccaaagatggttcagcaaaaattttgcgccgctgcaccatgccactcactgcgcaacatgcggtgcatatgctggttactgaactggctgtctttcgttttattgacggcaaaatgtggctcaccgaaattgccgacgggtgtgatttagccaccgtgcgtgccaaaacagaagctcggtttgaagtcgctgccgatctgaatacgcaacggggtgatttatgattggtcgcatatcgcgttttatgacgcgttttgtcagccggtggcttcccgatccactgatctttgccatgttgctgacattgctaacattcgtgatcgcgctttggttaacaccacaaacgccgatcagcatggtgaaaatgtggggtgacggtttctggaacttgctggcgtttggtatgcagatggcgcttatcatcgttaccggtcatgcccttgccagctccgcgccggtgaaaagtttgctgcgtactgccgcctccgccgcaaagacgcccgtacagggcgtcatgctggttactttcttcggttcagttgcttgtgtcatcaactggggatttggtttggttgtcggtgcaatgttcgcccgtgaagtcgcccggcgagtacccggttctgattatccgttgctcattgcctgcgcctacattggttttctcacctggggtggcggtttctctggctcaatgcctctgttggctgcaacaccgggcaacccggttgagcatatcgccgggctgatcccggtgggcgatactctgttcagtggttttaatattttcatcactgtggcgttgattgtggtgatgccatttatcacccgcatgatgatgccaaaaccgtctgacgtggtgagtatcgatccgaaactactcatggaagaggctgattttcaaaagcaactaccgaaagatgctccaccgtccgagcgactggaagaaagccgtattctgacgttgatcatcggcgcactcggtatcgcttacctggcgatgtacttcagcgaacatggcttcaacatcaccatcaataccgtcaacctgatgtttatgattgcgggtctgctgctacataaaacgccaatggcttatatgcgtgctatcagcgcggcagcacgcagtaccgccggtattctggtgcaattccccttctacgcggggatccaactgatgatggagcactccggtctgggcggactcattaccgaattcttcatcaatgttgcgaacaaagacaccttcccggtcatgaccttttttagttctgcactgattaacttcgccgttccgtctggcggcgggcactgggttattcaggggccgttcgtgatgcccgcagcccaggcgctgggcgctgatctcggtaaatcggtaatggcgatcgcctacggcgagcaatggatgaacatggcacaaccgttctgggcgctgccagcactggcaatcgccggactcggtgtccgcgacatcatgggctattgcatcactgccctgctcttctccggcgtcattttcgtcattggtttaacgctgttctgacggcaaccctacagacagaaggaatataaaatgaaaaattgtgtcatcgtcagtgcggtacgtactgctatcggtagttttaacggttcactcgcttccaccagcaccatcgacctgggggcgacagtaattaaagccgccattgaacgtgcaaaaatcgattcactacacgttgatgaagtgattatgggtaacgtgctacaagccgggctggggcaaaatccggcgcgtcaggcactgttaaaaagcggactggccgaaacagtgtgcggattcacggtcaataaagtgtgtggttcgggtcttaaaagtgtggcgcttgccgcccaggcaattcaggcaggtcaggcgcagagcattgtggcggggggtatggaaaatatgagtttagcgccctacttactcgatgcaaaagcacgctctggttatcgtcttggagacggacaggtttatgacgtaatcctgcgcgatggtctgatgtgcgccacccatggttatcatatggggattaccgccgaaaacgtggctaaagagtacggaattacccgtgaaatgcaggatgaactggcgctacattcacagcgtaaagcggcagccgcaattgagtccggtgcttttacagccgaaatcgtcccggtaaatgttgtcactcggaagaaaaccttcgtcttcagtcaagacgaattcccgaaagcggattctacggctgaagcgttaggcgcattgcgcccggccttcgataaagcaggaacagtcaccgccgggaacgcgtctggcattaacgacggtgctgccgctctggtgattatggaagaatcttcggcgctggcagcaggccttacccccctggctcgcattaaaagttatgccagcggtggcgtgccccccgcattgatgggtatggggccagtacctgccacgcaaaaagcgttacaactggcggggctgcaactggcggatattgatctcattgaggctaatgaagcatttgctgcacagttccttgccgttgggaaaaccctgggctttgagcctgagaaagtgaatgtcaacggcggggccatcgcgctggggcatcctatcggtgccagtggtgctcgtattctggtcacactattacatgcaatgcaggcacgcgataaaacgctggggctggcaacactgtgcattggtggcggccagggaattgcgatggtgattgaacgattgaattaacatgtaaaaacgcccgatagcgaaagtcatcgggcgttttcttgaacattgacagtaaagataacctcattaatcaccagtcaaaacttttcaccagcgtcagttcgccagcattacgcatcggtacaataaaagtttcctgtttctcattgaccgacccttcatcggtgatcagcgtcagttgggccgtagttaattccgtttcgctgcgtccgccatagtagttgatatacacctgataacggccgtgaactggcgctggcatggcgaaaatctcggggccgtaccctgtcgtgacatccatatccagtgcaccactgtttttcagcacggtgttaccgtaccaggcatattcaccgtcaggcgtaacgacatgaagatcgaggtcggtattgtccgtatcccacgagagaaccagccgtaaacgtgcgcgaatcgccccagcacccggcgttgagtaaaactgcattttttgtcggctttgcccatctgggctgatgacctgcacgctgttgctgccttcagtgaaaatataagggcgtgcaaaagaaccatctgattcaattctctgcggcatactggcaccgttgaccaccagccggccctgctgaactttacccgccgcagcataattctttattttgccgcggatctgcgctgagatattttgatcatctgccatgttgacggacgacgccgggtaattgatcgtttgtgaaaaactggcatcttcaccctctgccggatgccagccagagagcggtgcatcaatctcgacttcctgcacaccttcactgtgagcgacaggcgaaagcgccaccagtaacaacggaagaaaaatctttcgcatagcattagtccattaataattgtcgggtcagcgtttcgatatagttctcatcaagcccggtgggataaccatcaaaggccaggtgcagatactcatgggttaaatccagccgatcctgaagcgtaaagaagttacgaataaacagccgtttctgctgccgatcggtataggggaaacctgagactaaacgacagaccgcaaacacgtctggttcgttgtatcccgtctcaccttgtaatatacgccgccactgcggcatttttttcgccagccaggctttcgctttgggtaataactggcaggttgagcgtggcgctccccagcggctaaggttgttgtcgggataagcaaacgcaagtatctgatcataacgctctccctgccccgcctgggcagtagcgtgccgccaggaaagcgtcccttcggtaacccggctgccatgataatgaaccggatcgcccgcatagatgagatcctgcgtccaggcggtcatcgttcgcgcccccgtggtagctggcgaagccgaaacacgctgtgtggcgctgctgtcagggatggtcaggcaatcgccttcccgattggcgttttgctgtaagaaagtgcgaatcgccacggtcatagctttcgctgcctcagggggcgtacttttcgcctcgcgatccagaactctggcaacgtactcttcacgatcgagatgcgactgcaatttcagtttgccctttaccgtcagtaacgttgtctcaccgtggctgacaaatgtcatgtggttaccattggcaaacgtcacacgatagcgcccattgagcacgcctggtttgaatgccgtcgtactcttttcctcagtaactttcttcagcggataacgagcaaacagatccaccagcacacattgcccactggcaacttgcgtcggcactggcaaaacccgattaagcaccgtcgcataacgggttagtaccgttttgctggtgccactgccagtagcccacagcggtgtaccatcggttaaccagccagcaaaaccaccctgacggatttcctgcttatcatcggcaaaccagctccaggttttcacccgtacccgactaccgagcatggatgcgacatcgattttcgcctcgtccagcaccacatccagtaagacttcctgagctttgttttgcgcgggtaacgtcgctaaagaatcaagcagcgatttaaccgttaccgaggtttctggcttcagcgtagtaagagacgctaaccacgcaggtgcctgacgctgttgccagtattgcccccacacatctgcgccaatatgcaaccgctgcggcgcaaaatagagtccacaggagcgtaccagcgcggtatcgcgcgttatgctctccccagcctgacaacaataaacctcttccggggagtttccgcgacactggtagggctgctccggttgatgggtatcctccagccaggcgtaaacatacagtttccacaaactccctaatggcgtggtgagcgtgtcaggtaatgccgagactttggtcacgcctgatgacgacagctgatacagttgatcgtgttgcgcgccccgcagcgccagttgtaacggcgtctcctccgcaagcgttggcagagtaaccaacgccaatagccagacgattctgcgccagttcacttatttcacctgcatcccggtccattcactccctggcgcaacactttgctgtgcaggtgcataggaacgcacataacgagcaggaggcagaacgaattgccctttttgcgagaagcgcagcaaatggcggaaagtgaccgttcccgtcagttctttcaccggcaacatataggccagttcgcccatttcattacgcgctttttccagcaattgcccctgctgttttccagcgttaggtttattgaccgaaatgccccacgttgtccgctcaacgtcggctcccggcgggagcggtacttccacctgaccatagcgcagaactgcatcctgctcgctggtaagcataatttcatcgagatacagcgcatcgctgtcaatctcattgctggtcaccggctgcagagtaaagctcatctcttcttcaccggggataagccgatacaactggcgttcaacggtcaccggaatgttactttgttgagccgtttttgccggttcacgccagcggacctgcacattttgcggcgacaattcatcaccaaaagagagaatgtccggcacgccctgaccaacccaacgccagtattcgcctcctccggttaacttatgtttggcccatgcgcccgcaggcgcaggcaacacaactggaggcattgtcgccatatatttcgccagccagttcatggccaacgcgcgctcaatggtggattgctcagcggttaaaccacttaaaatagcggccgcctgggtagcgtcgcctccactattgagcagcacaaccgtgtgcgccagcggttggttgctgtttgctgctttatcccacgcatattgctgaacctgtggcatcacagtggacttcaactgcgcttttttcagcaacgtcatggttaagacgtttgccaccgcatctgccagtggagattcaggtgtatcgaggatcaggctgtcattgatatcgctggtgtcttcctcagagaaatcttcagttttagttccgcgccgggcgatagcttcatccaaccctttcaacaacgttttgcacggcagattcatctcctgtgcccacgccagcaccagcgcccgatgcaataacggcatgttgtccgcctgctcggcataactgtcgagcatatgttgccagtattccggttgctgcgttacgccgagcgcctggctggcctgccagtcggcgtaccatgcccatgccgtgaggaaggcgtcgccattgccatcttcaccccaccaggtaaagcgcactccgggccccgccagttgcatcagccgcagacggttatcctgaatcatctgacgaatgtcgttagcggcggcactttgatgatcggcaagcgaacgccaggcgagactgagcgggatcagacggctaccggtgttgatcacgccaccccacggttcatcgactaatgcatcaagattgttacggaaaatctcctgcggcgtttcgctactttgtagccggatattgctcgcctgctcgggcaacgtcagcgcattatcgccaccgccgagcatgacgtttttctgttgttcaacgggccagctgttatccacaaaagacagttttgtgctaatgctgtcctgtacttgcccattttgttgcagttctgcacttaacaagccagattgctgaatattctgcgtcagcgaaatataattcgcccctttgtgcagcgtcagcgtctggcgcatctcagcacctgcaaatttagtcaccagcgccaccggttcgttatcctgctgactgaagataaacagtcctgccgccggtttgtcgcccatgcgatacaccgttggcatactccatttcatgtagagacttttttccgaacgcagataagcacgcccctgcccgaccagcccgtcgccgttcatcccacgcgcggtgatgcgccagcgggttaacgaatcaggcatcaggaacgtgaaatacgctttgccttgtttatcggttgtgagtgacggcatccaggccgcggtatccacctcttcacgccgtggacgttcaagcatttttactcgccgctcgctgcggttagtcgcgccaggcgcaaccggctcgctggagagcgcctgatcgtagctgataaatgacaggctggagctggtacgcacattgttacgccccagcggatagaaaaatttgccgatattcggcgcgatttccggttgcagcgcgtagatcatttcatcgaccacacctaccgttaactgcgcagaaacaggtttacctttcagcgacgaggttaattcgacattgaccagttcaccaggctggtaatgggttttgtccgttttcacccggatatccagctggggaacggcaactttaatcccggcgttctgaaaactgtactgaccgttacgggtatacagcaccgaaaaagtgatgttaggcgcaaaggaattgctcaccggtacgcgggcttcatactgggtatcgtttaaacgttgtagcgttagccagtttgccggatgcgatagcagcgactgctgttccacgcgatcgcgttccagcgtcaataatgcttcatcaattggctccgggaaggtaatcagcatcttcgcggtttcgccaggctggtacagcgttttatctgccacgatatctaccgtaccagtatgcgacgtgctgcccttaccgctgactgcatggcttaacccggcgagaattaagccgtctttatcgcgtaatgtcagattgtagttgccaggtttagcgaaattgacggtaaaggatttgccgcctgacggtagctctccgctgtggctcgtgcggtcttcgagacgcaaccattcatacgtaacaggaacctgttttgaagattccagcgcggcataacggaacacaaccagctcgccgctattactgtattgtgcggcggtacttaaagagtaatgcgccaggccacgttcaatgaggatctctttggtggtggtaactcgatacgccgcgccgtcactggcggagacggttaacaaataacggctcggtttatcggcggcggggagattcaacgccacatgaccattatcgtcggaaaccgtttcactgccttccagcgacaccgggaaacgtcctgcataacgcaaatcgttaccaaccattgataattgctgagcgcgcaaacttaactgcacgcgggcattttttaccggctcgccatccgggtagagcagttgcagtttgccgctgaccgcttcgccagttttgaactcttttttatcgagagctaaaccaatctcaaaatggggtttgatgtagtttgccacgcgaaaactgctgctatagacctgtttgcggtaagcaagacgtaactcataacctccggcgacggcattttctggcaggcggaaactcccctgcccgccattacgcgcatccagcgtgacattgacggtttgcaacagactgccgttggcgtccagcaccgaaagcttcgccggtgcgctgacgatgggggatgaatgcaacggatcgtggaactcgcggcccatcactttaacatcgacacgatcgcctgcgcgatatagcgggcgatcggtaaagatatacaagcgggtgttgtagatttcgctttcgtagaaaaagttctcggagacaaaaacgccgccttcagcatccttacccagaatatatgaacgttctggcgatatatgttgtaactgcaaggtaccgctgccatcggtcacaccgcgggtcatcacgccaagaccgtcagtccacaagatctctgagccggtcttcgcttcaccctgttttttccccgcggtccacaccagaagctcgttacctgacactttgctaagcgccactgtatcggaaacaaacaccaccgtcgtcgcccgatacccacccactatcgcctcgacgaggtacagtcccggctcttgtttgccgagaggaatatagatgttgcccggctgcggcgaaatgaaattgctggatgcgccttccagttttaccccttgttgcggctcgaccggtttagcctgccatagtgggtaacggaactgttccactagtggatattttttcagcggtgaaaactggttgttctgtacataacgggaaggcttaataatggcattgccgagctgtaattcgggtaacgcctgagtcacattctgccgtgactgagaagagaaagtacgctgcatcacgcggcgagatttgccgtaccagttatcccacagccaggtcagcgtattgttcagtccgtcgcccagatattgcggttgcaccacaatgcgatgcaggtttttctgctggcgcaaaaatgccatcgggtcaggaatacgatacaggcgaacgtccacgccgccgtactcttccatctgatagcgccgataatcacgccccggcgcttccagtcgcactttcgcctcttcactgctgctaaaactgctgtcagcgagcaaaaagaatgttcccccggcgggcggcacatagttactggaaggaagcgaatcatcagcattagcaagccctgttcccacaagagacagggacaagcacgctgctatcgcgccagaaaatttaaacgataaatgccaatgaaattgggattggaatcgttgggtatccatcgggtgtccttccatgtcataagttgttgcagactgactgcgcgcattccgttgtcagttttcgtggcgcttccggtgtggtagatgatgtaacgccccatccagaccattaagtgctgggcatcgccctgatcgaaaaaaatcatatcgccaggcagtgcctggtttatgtcctggccaataaactggctgttgtactgaatcaaattaatcgcggtcacataggggccggttttcccattcccctgattccagttttgcgccagttgacgctgttcaggtgttagcgtcatctctggcggcaaatactggttagataaaccgttactttttagccatttactgtcgtgaactttcagcgcctcgttcgccgcaaatcgcaccaggcccgcgcaatcctgttgataccagcgtgggcttggcccctggcggagctgttcctgtgcaatgcgcacaaaccacgcgcgaaacagcccggattgttcgacatttagcatttcactatgggcaacaacacaatacagccagcaaatcagcaccagcagcccgtgtctcatagcggttgccaggttatgggtagccactgccaggcggcaccgggttccatctgggccagcttcatgacataacgcggttgttgagataaagcgtccagcttcggcattaataaagtttgtgcggcgttataaaaaaccggttcgagattcttcggcagactggtcagcgtttcgttacgcagcagtttcgccattccttgtggattgatatagagcggaacgatgccatcagtgggtattacatccaccattgccgggcgggttttattcagtgcttgcagggcgttattaaccagcgtgtcatcgagggagaaaagcagcgttttgttttgcatcgccagcgacacgcggaaaaaataatccgacattaattgatcgggttgcgccgcctgcgctttcggatactgaccgtatcgggaactcacttcgcgacgccagatttgcgcttcgccctgctgagtctggcttaccggcaaaacaccttctggcgctttgctttcgtgcgcaccaatattttgcgtaaacagtttccctggcaattgcgcctgttcggcagtgccatcaaactgaccaacaaatagcggggtttgtaattttgagtcttcataccagcaccgcccggcgccaccgtctaacgccccattcagcttgtcgttttcctggctgatgtgcgaaagcatctcttcggcaataccgtgtgaatacggcaccgccacacagaagctggctccggcaggcatactgttccataccggcgtaaaatcgaaactggcatctacgctggcggattcatcatttaacgccacaaagctatgccagccgtcgttacccatttcgaagcgcacgccagcaaaagaaggcattaatcgctggtagccaaaccccagcaacctggcgctgactacgatgcgctggcgtactggcgttttttcggcagtacgcgcttccaggccaaagcgggtttcccagcgttttttaccactcaacaaatcacttgcgatcgccgtagcttcggtatcctgttggtcatctttaaacagcatatccgaactggaaaacgccaatattttgtcctgataagtcgcaaacatcaggacgttattgccgttatagcgcaactgataaacaggaatagtttcactatttatcttgatgctactgatttccgtcttgcttaactggctgtcgctggtagcggcaaacaacaatggctccagcagtttgcttaaaccactgcgctggataagcaccatataatgtgaaagatgaccttgtttatcatgccacagtgccgcctgcgcgggctggtctaagagtgacgaaaagagcttatctttcagcgtgagatcgtgttcatagacaatgcggcgaatgctgccttcaatgcccagacgatcggcatgattctgataatagaaaacgaaatcttcgctcagaacatcgtggagaaacggaatggtaaggagatctttgggaagctggctcagagagtcgctgtcgagaaagaggtccggctcattgagatcgatttgcagattgttgtgcaccaccagtggcgacaacgttttttttggcccactgccagcatattgcaacgcccatacgccagcggatagcagcgctattgccccaaaaccaacaaggccataaaaccgccagcctttcgcctttttttcaccactcattgccacattccttgtgtatagccagccattttttacgggcacagccaaactttaccgcgccctaatacgacaaaagcccagactttacagcctggacttttcaattcaaaaaagggagatggctcccttttggcatgaagcgatgaaattattcttcttctggctcgtcgtcaacgtccacttccggagcgatttcatcgtccccttccgcggcactgccgtcgatggtatccagatcttcctcgtcaaccggttcagcaacacgttgcagacccaccacgttttcatcttccgaagtacggataaggattacgccctgggtgttacggcctacgatgctgatttccgaaacgcgagtacgtaccagcgtaccggcatcggtgatcatcatgatctggtcgcagtcatctacctgcaccgcgccaaccactaaaccgttacgttcggtaaccttgatggagataacccctttcgtcgcacgcgacttggttgggtattccgccactgcggtacgtttaccataaccgttctgcgttgcggtgaggattgcgccatcgccacgaggcacgatcagagagacgactttatcgccttcgcctaaacgaataccacgaacaccggtggtgttgcagcccatcgcacggacagaagactctttaaagcgcaccactttaccttcagcggagaacagcattacttcgtcttcgccgctggtcaggtcaacgccgatcagctcatcgccttcaaccagtttgatcgccactttaccggcggtacgcagacggttgaactcggtgaggacggttttcttcacagtaccgttagcggtcgccatgaagactttcacgccttcttcaaactcggtcaccggcaggatcgcggtgatacgttcgtcctgttccagcggcagcaggttgacgatcggacgaccgcgcgcgccacgagtggcttccggcaactggtagaccttcatcgaatagacgcggccacggctggagaagcacagaatatggtcgtgagtgttcgccaccagcagtcggtcgataaagtcttcttctttaatacgtgcggcagatttacctttcccgccacgacgctgcgcttcgtattcagaaagcggctgatacttcacgtaaccctggtgagaaagcgtgaccaccacatcttcctgggtgatcagatcttccaggttgatgtcggcgctgttagcggtgatttcggtacgacgtttgtcaccgaactgttcacgaaccaactccagctcttcacggatcacttccatcagacgatcggcgctaccaagaatacgcaacagttccgcaatctgatccagcagctctttgtattcgtcgagcagtttttcgtgctcaaggccggtcagtttctgcagacgcagatccagaatcgcctgagcttgctgttcggtcaggtagtacagaccatcacgcacgccgaactctggctccagccattccggacgcgcagcatcgtcgcccgcacgttccagcatcgcagcaacgttgcccagctgccacggatttgcaaccagcgcggttttcgcttctgcaggcgtcggcgcatgacggatcagttcgatgatcgggtcgatgttcgccagcgccacggctaatgcttcaaggatatgagcacgatcgcgagctttacgcagttcgaaaatagtacgacgggtcactacttcacggcggtgacgaacaaacgccgcgatgatgtctttcaggttcatgatcttcggctgaccatggtgcaatgccaccatgttgataccgaaagaaacctgcaactgggtctgggagtagaggttgttgagcacaacttcaccgaccgcatcgcgtttcacttcaatcacgatgcgcataccgtctttgtcagactcgtcacgcagcgcgctgatgccttccacgcgtttttcttttaccagttccgcaatcttctcgatcaggcgcgctttgttcacctgataaggaatttcgtggacgataatggtttcacgtccggttttggcgtcaacttctacttcggcacgggcgcggatatataccttgccgcgaccggtacggtaagcttcttcaataccgcgacgaccgttaatgattgccgccgtcgggaagtctggccccgggatgtgttccatcagcccttcaatgctgatgtcttcatcatcgatatacgccagacaaccgttgatgacttccgtcaggttgtgcggcgggatgttggttgccatacctacggcgataccggaagaaccgttcaccagcaggttaggaattttggttggcatgacgtccggaattttttccgtaccgtcatagttatcaacgaaatcgaccgtctctttttcgagatcggccatcagttcatgggcaattttcgccagacggatttccgtataacgcattgccgccgcagagtcgccgtcgatggaaccgaagttaccctgaccgtctaccagcatgtaacgcagcgagaatggctgcgccatacggacgatcgtgtcataaaccgccgagtcaccatggggatggtatttaccgattacgtcaccaacgacacgggcagattttttataggctttgttccagtcattgcctagtacgttcatggcgtaaagtacgcgacggtgtaccggcttcaggccatctcggacatctggcagcgcacggccaacaatgaccgacatcgcataatccagataggagctcttcagctcttcctcaatgttgaccggtgtaatttctctcgcaaggtcgctcatctaaccgctatccctctactgtatcccggattcaaaggtcgcaaattataacacagccgcgcagtttgaggtaaacctatacgctttattcacatccaatgcctgatatactcgtttgtcttgccaattacggagtagaagtgccaatgaatgccgaaaaatcgccggtaaaccacaacgtagaccacgaagagatcgctaaatttgaagccgtcgcctcccactggtgggatcttgaaggtgagttcaaaccgctgcaccgcattaacccgctgcgtctgggctatattgccgagcgtgctggcggtttatttggcaaaaaggtgctcgatgtcggttgtggcggcggcattctggccgagagtatggcgcgggagggcgcgacggtgaccggtctggatatgggctttgagccattgcaggtggcaaaactgcacgcactggaaagcggcattcaggtggattacgtgcaggaaaccgtggaagagcacgcggcaaaacatgccggacagtatgacgtggtgacctgtatggagatgctggagcacgtccccgatcctcagtcagtggtcagagcctgtgcgcaactggtgaaaccgggcggcgatgtctttttctcgacgcttaaccgcaacggcaagtcatggctgatggcggtggttggtgcggaatatattttgcgcatggtgcctaaaggtacacatgatgtgaagaagtttattaaaccggcagaattgctgggctgggtggttcagaccagtcttaaagaacggcatatgaccgggctgcattacaaccctatcactaacacctttaagctcggccccggcgtggatgtgaactatatgctgcatacgcagaataagtgaggttgttgtttggattcatccggcaaccgcgccaagcctgatgcgacgcttgccgcgtcttatcaggcctacaaatgctccccgtaggccagataaggcgtttacgccgcatccggcaacagtgccggtcagacagcgattaccatttcactgtcatcgacaaaaaccctgccgtctgggcaaaatcatcactccctttctgccacgccacgctgccgcgcagcgaaactcgctgactgatattgcccgttattcccacttttatttcaccccgttgcttcgccgcatcgtcactgatagtgctgccatcttcttcaatttccgtcgcatggggatcgtgataataattcagatctaacgttggcgtgacactaacagcagtacgccattcgctgtgtaaacccagccgcgtctgaatatcatcaccctgcgattgtgacacgcgcgcatggttagcggcggtaaaatcatcctgctgcacgccctgataaatcacctgcgcctgcggttcaatcaccacaccacgccccggtaaccattgatacccggcttccagcgaggcgataatccccgacgagtggtaatgatccacgccatcgtcttgttcggaaacatcattgttaaaccacgcatattgcagccagctatccaaccaggccccctgcttctgattaccgtgctgataccagcttgaggtcagcccaacggcataaccgtggttctggttatcggcgcgagttccggtcatattcgagcggctgtcgccctggttatcgctgtagccaccaacaatcccaagcatccactcgccatcatcaccccagtgcccgctaaacaggttgccgctaagctgcaccgtagaagtgtcttcatgctgagccaactgccctaccgccgtgtaatgataacgcccgccgataacgcgtaaattcagcgtctgaccatcgccaccagcgtgatcgcgtcgctccatcacaaatgcctgatttgccgcccgcaggttattaaaatatccaccaactttggcattcaacaccggctggtaggcaggtgtaggttccgggtcgggggttgggtcgggatccggcgtgggatcaggatctggagtcgggtccggatcaggcggcggcgtcggattgacttcttgtgatcgcagataccagtcgttgttatcttccaccagcgtgtagtcatacgcccccatattgacgtagccgcttcctgtcagactgaactgcgcattgttttgaaactgcgcgggatcagctgcgaaatcaactactttaatacctgtagatgtcggctcaccaatacccgtaatggggttaattaccacggccgtgttgccagcagtattaccgttcaataccagttggtcacttgctgagtcatcgccgtttaattcgctatcgagcagtagcgtaccgccgccggtataatcaccatttaccgtcagcgtgtcgccagcgacgccattttgcaggctaatcgcaccggacgtattggtcagattgccattaaccgtcacgtcggaaagataagtcaggctgtcagtttcaaggttggtattaagctcacctgccagcgtcacgccatcggtggcattcaccagcgtaccgtcgccgctaaacagcgaggcatccagcgcctggttcgtatcctgctgcgtcaatcgcaacacagtaccatcggttatgtcgatatcgccgccagaggtggcatcgattgaacgaatatcctgattttgcccggtttcaaaaacaccgtcttcccccacccacagtgaagaaacataaggaataatattctccgcttcaccttttagcgttccgtcctccacacgtaccgcagacgtcgcagtgccgctggcagtcaactccagcgtaccgccgccacttttagtcaacgtgcttacgctatccagttgttgcccggtactatccgccatcaacccgccccattgcgtatctacgccatcctcaacgtgtatttcgccatcagcgcgcatttcaatattcctgccctgacctgttgtagccgagcgagtgtcaacatcagtcgtcacatccatttcactgtgttgttggggatctgtgaagatcactgaacggttgtaacttgtgtcccccaattgcgaattatcgctgacttcaagcgtaccggaggcgatttgcgtattaccgagataaccgttgttattcgccagcgttacgcgctgatcccccgcattaatgacgacataaacgccattctggctggcatcgctgccgccaatatgtaaatcatcgccactgctgatatcaacgacatcattactgccaatcactgtccccccgctgccgctgatttgcagaccgtcattgtatgagctatcgccatcccaggtggtgaaatcagagagatccaatactccgccatttagcacgatcgattgcggatcgctctgcattgcccgtaaatcggcctgattccccgccagcgacaatacggcgttatcttccaccacaatatcgccggttaatgccatcgactgcgcccctgtcaggagatagctgccatcttgcgctaccgtcaactgtccttcaccctgaatcgagccggaaaaaccgccctggtttactgtaacattgccgcctgcgtcgatattcaaaatgccattagcaaaaccggttaatgagtgcacaaacgtttgttgtgtattgccaacattcagttctgcctgatactcagaatgaacagtgctgccgaccatcaaaccaaagcaatcctgcggatcgctctgacagtgcgtgtcgccgacattcattaactcatcgctgcgccccaacgtcacctcgccattctggatactcatctcgccggtaaacgcattattgtcggcattgaggactaactctcccgctccctctttcacgatgactcccgttccggcaagagaatcaatcgcgccatcgttgctggtattgcctattaccagcgttttatcggcggcaatgttaaattcagccacactatgaccgatatacataaagccccccgccgctgccgtcgccgaatggtcatatcccgaggcgctgttattttcatcaatcatcacaccattgttttggtcataattatcatcaacagaaatatcaataagatacggggatgtggtgctgctggtataaattgcgccgccataaccttctgcatagttattggtaaaggaggtattattaattatcgtttttcctgaaagatgtgtgttatccgtactattatccgtaacatcaatggcgccgccatccccatcactataacttgttgatgtatatgcctggttattattaaaagcatcatcacttaaatagacgtcattattgatggtataaattgcaccgcctttgccgtcattagcgatgttattgtgaaatacggcgttagtgacacgtaaatcggcggcaccggtatcattggtaccggcagaatagattgccccgccatagcctcctgcaacattactgtcgaaaataacattcgcaagatttatcgttgagttttctttagcaaagatagccccaccattattatattcgccactaaccgagttatcagcaaacagggtcatccctgtttcattttgtggtgatatcgtaaattcagcactgtgctgcaaaaatactgcgccaccgctggcattattggccatacccgaaaaaatcaaccattgcccatccgcgatgctccagtcctgcatattgcctgaaaggctttgcctgctggcctgacagttcgctttgatatcatatccctggcatgaatcaatgaccgctgcggcaccgttagcagagaaaagagatgcaatcattgacgggagtaaagataaatactccttgcgtagagagataatccgcatattcatctaaccatcattttctataagatggcgtatttaatcgcattatgcgatatagggtatttttcttttgtaaattctgcccctgatgtaataactattttgttattatctgataattaatttagatgcatcacaattcaaattaataactttaaggtaaatcggttatatttaaactgaattaaagcaataaataatattcttataataaatacaaaagtaacaaattggcttagtatttaacaataaccgaatataaaacaaccatttccgactcaacaatcgcttacactcgcttatatattgaccacaactgatacatcagattatgtgacgacttgtgcctagatcaattttggcaatcattagcaacaagattaataaaccatctatatcaatttacctatcctattttaccgttcaagaattcaccgaacggttatttttaacaaatttttctcttcccattgactttcccggacaccttgtctgacctaaggtgcgcggaagccactttttccttcctgagttatccacaaagttatgcacttgcaagagggccagtttcacactatcttgcagtgaatcccaaacataccccctatatatagtgttcttagcagcttccctcactacaggtagtctgcatgaagctattgaaaaacaggtacgacatacatgaatcagaatctgctggtgacaaagcgcgacggtagcacagagcgcatcaatctcgacaaaatccatcgcgttctggattgggcggcagaaggactgcataacgtttcgatttcccaggtcgagctgcgctcccacattcagttttatgacggtatcaagacctctgacatccacgaaaccattatcaaggctgccgcagacctgatctcccgtgatgcgccggattatcagtatctcgccgcacgtctggcgatcttccacctgcgtaaaaaagcctacggtcagtttgagccgcctgcgctgtacgaccatgtggtgaaaatggtcgagatgggcaaatacgataatcatctgctggaagactacacggaagaagagttcaagcagatggacacgtttatcgatcacgaccgtgatatgaccttctcttatgctgccgttaagcagctggaaggcaaatatctggtacagaaccgcgtgaccggcgaaatctacgaaagcgcccagttcctttatattctggttgccgcgtgcctgttctcgaactacccgcgtgaaacgcgcctgcaatacgtgaagcgtttttacgacgcggtttccacatttaaaatttcgctgccgacgccaatcatgtccggcgtgcgtaccccgactcgtcagttcagctcctgcgtgctgattgagtgcggcgacagcctggattccatcaacgccacctccagcgcgattgttaaatacgtttcccagcgtgccgggatcggcattaacgccgggcgtattcgtgcgctgggtagcccgattcgcggtggcgaagcgttccataccggttgtattccgttctacaaacatttccagacagcggtgaaatcctgctctcagggcggtgtgcgcggcggtgcggcaacgctgttctacccgatgtggcatctggaagtggaaagcctgctggtgttgaaaaacaaccgtggtgtggaaggcaaccgcgtgcgtcatatggactacggggttcaaatcaacaaactgatgtatacccgtctgctgaaaggtgaagatatcactctgttcagcccgtccgacgtaccggggctgtatgacgcgttcttcgccgatcaggaagagtttgaacgcctgtataccaaatatgagaaagacgacagcatccgcaagcaacgtgtgaaagccgttgagctgttctcgctgatgatgcaggaacgtgcgtctaccggtcgtatctatattcagaacgttgaccactgcaatacccatagcccgtttgatccggccatcgcgccagtgcgccagtctaacctgtgcctggaaatcgccctgccgaccaaaccgctgaacgacgtcaacgacgagaacggtgaaatcgcgctgtgtacgctgtctgctttcaacctgggcgcaattaacagcctggatgaactggaagagctggcaattctggcagtacgcgcactcgacgcgctgctggattatcaggattacccgatcccggccgccaaacgtggagcgatgggtcgtcgtacgctgggtattggtgtgatcaacttcgcttactacctggcgaagcacggtaaacgctactccgacggcagcgccaacaacctgacgcataaaaccttcgaagccattcagtattacctgctgaaagcgtctaatgagctggcgaaagagcaaggcgcgtgcccgtggtttaacgaaaccacttacgcgaaagggatcctgccgatcgatacctataagaaagatctggatgccatcgctaatgagccgctgcattacgactgggaagcactgcgtgagtcaatcaaaacgcacggcctgcgtaactccacgctttctgccctgatgccgtccgagacttcttcgcagatctctaacgccactaacggtattgaaccgccgcgcggttacgtcagcatcaaagcgtcgaaagacggtattctgcgccaggtggtgccggactacgagcatctgcacgacgcctatgagctgctgtgggaaatgccgggtaacgatggctacctgcaactggtgggtatcatgcagaaatttatcgatcagtcgatctctgctaacaccaactacgatccgtcacgtttcccgtcaggaaaagtgccgatgcagcagttgctgaaagacctgctcactgcctacaaattcggggtcaaaacgctgtattatcagaacacccgtgacggcgcagaagacgcgcaggacgatctggtgccgtcaatccaggacgatggctgcgaaagcggcgcatgtaagatctgatattgtgatgccggatgcggcgtgagcgccctacccggcctacgggtccaatttgtaggccggataagcgaagcgcatccggcactggatgcccagatgcggcatgaacgccctacccagcctacgatgcggtttgtaggccggataagcgaagcgcatccggcataaaactcctaacaggacacattcatggcatataccaccttttcacagacgaaaaatgatcagctcaaagaaccaatgttctttggtcagccggtcaacgtggctcgctacgatcagcaaaaatatgacatcttcgaaaagctgatcgaaaagcagctctctttcttctggcgtccggaagaagttgacgtctcccgcgaccgtatcgattaccaggcactgcctgaacacgaaaaacacatctttatcagcaacctgaaatatcagacgctgctggattccattcagggtcgcagtccgaacgtggcactgctgccgctgatctcgatcccggaactggaaacctgggtagaaacctgggcgttctcagaaacgattcattcccgctcctatacccatatcatccgtaatatcgttaacgatccgtcagttgtctttgacgatatcgtcaccaacgagcagatccagaaacgtgcggaagggatctccagctattacgatgaactgatcgaaatgaccagctactggcatctgctgggcgaaggcacccacaccgttaacggtaaaaccgtaaccgttagcctgcgcgagctgaagaaaaaactgtatctctgcctgatgagcgttaacgcgctggaagcgatccgtttctacgtcagctttgcctgctctttcgcattcgctgaacgtgagctgatggaaggtaacgccaaaattattcgcctgattgcccgcgacgaagccctgcacctgaccggcacccagcatatgctgaatctgctgcgcagcggcgcggatgatccggagatggcggaaattgccgaagaatgtaagcaggagtgctatgacctgtttgtccaggcggcacagcaagagaaagactgggcggattatctgttccgtgatggttcgatgattggtctgaataaagacatcctctgccagtacgttgaatacatcaccaatatccgtatgcaggcagtcggtttggatctgccgttccagacgcgctccaacccgatcccgtggatcaacacctggctggtgtctgataacgtgcaggttgctccgcaggaagtggaagtcagttcttatctggtcgggcagattgacgcggaagtggacaccgacgatttgagtaacttccagctctgatggcccgcgttaccctgcgcattactggcacacaactgctgtgccaggatgaacacccttcccttctggcggcgctggaatcccacaatgtggcggttgagtaccagtgccgcgaaggttactgcggctcctgtcgcacccgactggtcgcaggccaggtggactggattgccgaaccgttagcttttattcagccgggggaaattttgccctgttgttgccgggcaaaaggcgatattgaaatcgagatgtgaattggttttaacgccagatacgacgcttatacgtcttatctggcctacaacgattacatagcgtagtaatatgctttcacctgctcccagtccgctttggggatcggctccagatatttttccagctggcggaagtcatgattaatcgctttatcacgacgcaagcggcgacgacttttctccaggtcaagaaatccagcttctgccttaccttctgttttcacatagatatggcgaacataacaacagccatgctgacgattaacgctatgcattttcttaaacgccagcgccactgctttcaacatggcttgccgtacttcgtcagaataaggcgatactgcatgccgggcataccagtcagcaatgctgatgaaccccgccatatcttcagtcaccagcaacgcgcgccattcaccctcaactttcaccgcttcaccaaaaacgatcttcggcacgatgacaccggcccgttccagttctttaattaccgcaacctcacggacaatcgttggtcggccgaacgggtaacgtacagaatgaaacagatgatgcgtcatgcgctttacatacagctttttgccgttgcgctcgacgcattgcaccccgctcataccattacggcgatagttaggctcttcaacccagtcgccctctgttgcccaccagtgattaaattcgtcgtgctttgctgaaactgccataccctatcgcctgtcgttttttattaacgacaatgactatagatgtttagctgaggaaaatcttaataatacgtgttgtattgacgagtatcttatgccgggaacaagtcatctcgctcaaaataattgcaattaaggataacccacagactttaatgaagagtggtatcggatagcacataagtgccatccggtagttaatttactctttattaaggaattttactgccttatcagggaaatcagtaaatagcccgtttacacccgctttgttatacagagcatcatataactgattcacatcagtagtgtattcaggcagtttatctgaccgcacggtataaggatgcactaccagtttattctgctgagcatcttgcaccatgccagtgagtttgatattacccggctgcgatgtctcctcaatcaacatatggtaatccggaccaataccatcagcatattccgccacctgtttcatagcccccggcttaaacatccagtcgtaattgtaattaacccagcttccgtccggctgtttctgctgcgtttcattccagtcggtataggcaatcagctgtaccagattgagatccatacccattttgggttccagcacattcttaatacgcttcagctcatcagcatcaaaacattgcaaataaactttgtcgtccttaccggtgtaaccatatttcttcagcacttccagcgtttttgccgcaatatccttcccttcctgatgatggaaccacggcgctttaatttctggatagataccgatatttttcccggtagagtggtttaacccctgaacaaattcaatctcttcttcaaaggtgtgcacccggaagtcagatttacccattgggaaacgccccggataagtctgcacttttttaccgttttcaatatcgaaaccttcggtaaatttcagcgacttaatttcatccagcgtgaaatctatcgcgtagtaacgaccgtctttgcgcgctcgatccgggaaacgatcggcaacatcagtaacacgatcgagataatggtcatgcagaacaaccagatggtcgtctttggtcatcaccaaatcctgttccagataatccgctccctgcgcatacgccatcgcttttgctggcagcgtatgctccggcaaatatccactggcaccgcgatgggcgatgactattttttcgttgctgtccgccgccattgcactgcttcccatgactatagtgctcatcatgatcgccatgctaaggtttttcagcgtcaatttcatgccattagcctccgttgcgtttttgcagtaattgttcatggcgacgtttttcgccaatcatcacaacaatcaacaagataaccgccagaatgctgccgccaatcattaccataaagccgccatcccagccgaagaagtccacggtgtagccaacaatcgcgctcgccgccaccgaaccgccgaggtaaccaaacagcccggtaaaacccgctgccgtacctgccgcttttttcggtgccagttccagcgcatgtagaccgatcagcatcacagggccatagatcaggaagccgataacaatcatacaaatcatatcgacggttgggttacctgccgggttcatccagtaaacgatagtcgcgatggtcaccagtgtcataaagaagacgccggttgccccacggttaccacgaaagactttatccgacatccagccgcacagcagggtgcccggaatacctgcatattcataaaggaagtaggcccaggaggatttatccagcgcgaaatgcttaacctctttcagataagtcggtgaccagtcgaggatgccgtaacgcagcagataaacgaacacgttggcaatggcgatgtaccacagcagtttgttcggcagcacgtactgcatgaagatctgcttcgcggtcagctcctgttccgctttttcgttatagtcgtccggataatcatttttgtactcttcgatcggcggcaggccacaggattgcggggtatcgcgcatcatcgcaaaggcgaacagtgccaccagaatggcgcagaaagcgggcatatagagcgccgcgtgccagtcattgaaccaggccatccccagcaggaacagcagcggcggaataccaccaccgacgttgtgcgcacagttccacactgacacaatgccgccacgttctttctgcgaccaccagtgcaccatagtacgaccacacggcggccaccccatcccctggaaccaaccgcagaggaacaacagtacaaacatcaccgcaatgctcgacgtcgcccatggcacaaagcccataaacaacatcactgccgccgccagaatcaaacctgcgggcaggaaaacgcgcggattcgagcgatccgataccgaacccatgatgaatttcgaaaatccataagcaatcgagatccccgaaagggcaaaacctaaatcaccgcgtgagaatccctgctcaaccagataaggcatagcgagcgcaaagttcttacgaaccaaatagtaagcagcatagccaaagaatatccccaggaaaatttgccagcgcaatcgacgataagtcggatcgatctccgcggcaggtaagcgcgctttgtgtggcgctggtttaaaaatactcaacattgatagcctccgtggcccgtggtcttatttatgattaacagcctgattccgtgggagaacctgccgtttcttgagttgccgcgatgttaagaaaacattcataaattaaatgtgaattaccgcacacattattaaatacgatggttgaaatgttcagaatgacgcatgaaatcacgtttcactttcgaattatgagcgaatatgcgcgaaatcaaacaattcatgtttttactatggctaaatggtaaaaaacgaacttcagagggataacaatgaaaactcgcgactcgcaatcaagtgacgtgattatcattggcggtggcgcaacgggagccgggattgcccgcgactgtgccctgcgcgggctgcgcgtgattttggttgagcgccacgacatcgcaaccggtgccaccgggcgtaaccacggcctgctgcacagcggtgcgcgctatgcggtaaccgatgcggaatcggcccgcgaatgtattagtgaaaaccagatcctgaaacgcattgcacgtcactgcgtagaaccaaccaacggcctgtttatcaccctgccggaagatgacctctccttccaggccacttttatccgcgcctgcgaagaagcagggatcaacgcagaagccattgagccgcagcaagcgcgcattatcgaacctgccgttaacccggcactgattggcgcggtgaaagttccggatggcaccgttgatccatttcgtctgacagcagcaaacatgctggatgccaaagaacacggtgccgttatccttaccgctcatgaagtcacggggctgattcgtgaaggcgcgacggtgtgcggtgttcgtgtacgtaaccatctcaccggcgaaattcaggcacttcatgcgcctgtcgtagttaatgccgccgggatctgggggcaacacattgccgaatatgccgatctgcgcattcgcatgttcccggcgaaaggatcgctgctgatcatggatcaccgcattaatcagcatgtgatcaaccgctgccgcaaaccttccgacgccgatattctggtgcctggcgataccatttcgctgattggcaccacctctttacgtattgattacaacgagattgacgataatcgagtgacggcagaagaagttgatattctgctgcgtgaaggggaaaaactggcccccgtgatggcgaaaacgcgcattttgcgggcctactctggcgtacgcccgctggttgccagcgatgacgatccgagcgggcgtaacgtcagccgtggcatcgtgctgctcgaccatgctgaacgcgatggtctggacgggtttatcaccatcaccggtggcaaactgatgacctatcggctgatggcggaatgggctaccgacgccgtatgccgcaaactgggcaacacgcgcccctgtacgaccgccgatctggcacttcctggttcacaggaacccgctgaagctaccttgcgtaaagtcatctccctgcctgccccgctgcgcggttctgcggtttatcgtcatggcgatcgcacgcctgcctggctgagcgaaggccgtctgcaccgtagcctggtatgtgagtgcgaagcggtaactgcgggtgaagtgcagtacgcggtagaaaatttaaacgttaatagcctgctggatttacgccgtcgtacccgtgtggggatgggcacctgccagggcgaactctgcgcctgccgcgctgccggactgctgcaacgttttaacgtcacgacgtccgcgcaatctatcgagcaactttccaccttcctaaacgaacgctggaaaggcgtgcaacccatcgcctggggagatgcactgcgcgaaagcgaatttacccgctgggtttatcagggattgtgtggtctggagaaggagcagaaagatgcgctttgatactgtcattatgggcggcggcctcgccggattactctgtggcctgcaactgcaaaaacacggcctgcgctgtgccattgtcactcgtggtcaaagcgcgctgcatttctcatctggatcgctggatttgctgagccatctgccggatggtcaaccggtgacagacattcacagtggactggaatctttgcgtcagcaggcacctgcccatccttacactcttctcgggccacaacgcgtgctcgatctcgcttgccaggcgcaggcattaatcgctgaaagcggtgcgcaattgcagggcagcgtagagctggctcaccagcggattacaccgcttggcactctgcgctcaacctggctaagttcgccagaagtccctgtctggccgctgcccgcgaagaaaatatgcgtggtgggaattagcggcctgatggattttcaggcgcatcttgcggcggcttcgttgcgcgaactcgaccttgccgttgaaaccgcagaaatagaactgccggaactggatgtcctgcgcaataacgccaccgagtttcgcgcggtgaatatcgcccgtttccttgataacgaagaaaactggccgctgataattgatgcgctaatccctgtcgccaatacctgtgaaatgatcctgatgcccgcctgtttcggcctggccgatgacaaactgtggcgttggctgaatgaaaaactaccttgttcactgatgcttctgccaacactaccaccttcagtgctggggatacgtctgcaaaaccagttgcagcgtcagtttgtgcgtcagggcggtgtgtggatgccgggcgatgaagtgaaaaaagtgacctgtaaaaatggcgtggtgaatgaaatctggacgcgcaatcacgccgatatcccgctgcgcccacgatttgtggtgcttgcgagcggcagtttctttagcggcggactggtggcagaacgtgacggcattcgcgagccgattctcggccttgatgtgctacaaaccgctacgcggggtgaatggtataagggcgatttttttgcgccgcagccgtggcagcagttcggtgtaaccactgatgaggcgctacgcccgtcgcaggcggggcaaaccattgagaacctgtttgccatcggttcggtgctgggcggatttgatcccatcgcccagggatgcggcggcggtgtttgtgccgtcagtgctttacatgtcgctcaacagattgcccaacgcgcaggaggccaacaatgaatgacaccagcttcgaaaactgcattaagtgcaccgtctgcaccaccgcctgcccggtgagccgggtgaatccgggttatccggggccaaaacaagccgggccggatggcgagcgtctgcgtttaaaagatggtgcactgtatgacgaggcgctgaaatattgcatcaactgcaaacgttgtgaagtcgcctgcccgtccgatgtgaagattggcgatattatccagcgcgcgcgggcgaaatatgacaccacacgcccgtcgctgcgtaattttgtgttgagtcataccgacctgatgggtagcgtttccacgccgttcgcccccatcgtcaacactgctacctcgctgaaaccggtgcggcagttgcttgatgcggcgttaaaaatcgaccaccgtcgcacgctaccgaaatactccttcggtacgttccgtcgctggtatcgcagtgtggcggctcagcaagcgcagtataaagaccaggtcgctttctttcacggctgcttcgttaactacaaccatccgcagctaggcaaagatttaattaaagtgctcaacgcgatgggtaccggtgtacaactgctcagcaaagaaaaatgctgcggcgtaccgctgatcgccaacggttttaccgataaagcacgcaaacaggcaattacgaatgtagagtcgatccgcgaagctgtgggagtaaaaggcattccggtgattgccacctcctcaacgtgtacatttgccctgcgcgacgaatacccggaagtgctgaatgtcgacaacaaaggcttgcgcgatcatatcgaactggcgacccgctggctgtggcgcaagctggacgaaggcaaaacgttaccgctgaaaccgctgccgctgaaagtggtttatcacactccgtgccatatggaaaaaatgggctggacgctctacaccctggagctgttgcgtaaaatcccggggcttgagttaacggtgctggattcccagtgctgcggtattgcgggaacttacggtttcaaaaaagagaactaccccacttcacaagccatcggcgcaccactgttccgccagatagaagagagcggcgcagatctggtggtcaccgactgcgaaacctgcaaatggcagattgagatgtccacaagtcttcgctgcgaacatccgattacgctgctggcacaggcgctggcttaaactcctttctgatgcccggtaagcatgttgttaccgggcatttttgcgtacacgattccgtgcccaatgtatgcgttgcaacgcagtgaaaattcctctgaaaacgtctcgcaaaggctgaaactggcagatgtcaaaggcctgggataaccgtaatgtcgcgtcatcataaatatcaggtgacggacaaccatgaccgaatcaacaacctcctccccgcatgatgcggtgtttaaaacctttatgttcacacccgaaaccgcacgggattttctggaaatacatctaccagagccgctgcgcaagctttgcaacctgcaaaccttacgcctggaacccaccagttttattgaaaaaagtttacgcgcttactactcggatgttttgtggtccgtggaaaccagcgagggtgacggctatatctactgcgtgattgaacatcaaagctctgcagaaaagaatatggcttttcggctaatgcgctatgccactgccgccatgcagcgtcacctggataaaggctatgacagagttccgctggtggtgccattgctgttttatcatggcgaagcctcgccctacccgtactcactcaactggctggatgagtttgacgatccgcaacttgcccggcagttgtacaccgaagcttttccgttggtggatatcaccatcgtacctgacgatgagatcatgcaacatcggcgtatagctctgctggaactgattcaaaagcatattcgcgaccgcgatttaatcggtatggtcgacaggatcaccacgcttttggttagaggcttcactaatgacagtcagctacaaacactgtttaattatctgctgcaatgcggcgatacctcccgtttcacccgctttattcaggagattgccgaacgttcaccactacaaaaggagagattaatgactattgctgaacggctacggcaggaaggacatcaaattggctggcaggaaggtaaattagaaggtttgcaggaaggcatgcatgaacaagccattaaaattgctttgcgcatgctggagcagggcattgatcgtgaccaggtgctcgcggccactcagctaagcgaagccgatctggcagcgaataaccactaattaacacaggcccacagccgatccccatgggcctttgatatcaataactaccttttacgcgtggcccatttttgcctgatttaaacatcgccagtcgttgatccagggcatcgctgtagagcatcgtgtcaacgccaacagcgacaaagttcgctccccacgccaggcattgctgcgccatatcaggagccacagccagaaaaccagccgctttacccgcagcacggatccgccgaatgctggtttcaataattcgctgcacttccgggtgcccggcgttatccgggtagcccaacgacgcagaaagatccgcaggtccaataaacacgccatcaatcccttcaacatcgaggatttcgtccaggttatccagtgccgttttactttccacctgcaccaacagacaaagcgaatcgttgacttgcgccatgtaattctcaatgcgtccccagcgtgcagcccgtgccacactggccccaacaccacgctcaccgtagggaggatagcgcgtggcagacaccacctgacgtgcctgatcggcagtatcgaccatcgggatcagtagagtttgcgcgccaatatccaggacttgtttaatcagcggcttactgccttccaccggacggatcacggggtggctggcatagggcgctaccgcctgtagctggtgataaagatcctgaatggtgtttggcgcatgctccccgtcaatcagcaaccagtcataaccggaagtggcggcaatttctgccatataggcagtcgttgagcttaaccacagaccaatttgcacttcgcccttgcgtaaacgttctttaaagggattggttaataatgcgttcatcgtgttccttaaactatttaatgatgtgccacgtcggtctgcgcaacagtgcgatttacacgcagagtgaaaataatcagcgaaccgatgaccgccaccgctgccagcgtcagtaatcccgccgcatcgctggaaaataacgtttctgctttcacgcgcaggatcggggcaataaacccgcccactgcaccaaacaggtttataaaaccaatccccgcagccagcgccgtaccggaaagaagctgtgtcggcatcgtccagaacaccggttgcacggcaataaacccgatggctgcaacacacagtgctacgatcgccagtactggagaaagcagcccggacagaccaataccaatgcccgccgccagtaatgtcagcgctgcgacattacgccgttcgccggttttatcggagtagcgcggaataagccaggtcccaaacaaggccgcaacccacggaatggcggtgaccaccgacgccgtaaagcccacttttgtccccagcaatgcagcaacctgggtcggcaggaagaaaattaatccgtaaaccgccacctgaatggtcaggtagataatcgccagttgccagactcgcccattacgcaacgcatcgctcagtcgcgaagtcactttctgttgttcttcacttgccagttgattgataagtaacgttttttcttgtttactcagaaaacgtgcctgctccggtgtgtcatcaagccaaaagaatgtgaataccccagcgccgactgccagcaatccttcaatcacaaacatccagaaccagccgggatgccccataaatccatgcatctccagcagcgcgccggaaagcggtgatcccagtgttaacgccagcggtgcgcccatatagaacagccccataatgctggcgcgattacgctgcggaaaccattgcgaagtgagataaatcataccagggaaaaaaccggcctccgcagcaccaagcagagtgcgaacgatcagaaatttcgcttcagtatcggcccatgccatggcagccgaaagaaatccccacagcagtgttgtcgtaccaatccaggttctggcccccagtttgcgcatcaaaagattcgccggaacccccagaaacgcgtataccacaaagaaaatgcctgctcccagcgcataagcttcattactcagcccggtatcaatctggtaggtctgtttggcaaaaccaatattcgaacggtcgagaaacgccagcacatacagcgccaacataaacggaattaaacgcgcgcggtttttcttcaccacggcgtcaagcaaagcggtgctcataaaaagctccttagaatatgtgggcgttaccgttgtcacagcaacgcccggagtgattagtggctgtaggggcgtttcaaattgcagtcacgattgagttcgacgccgaaaccgggtttatcaagcactgatttatgaatacgaccattcaccggtactggctcattaagcagaatcggatcaaattgcggacgcatcgttgaacaatccgggctggtcatcaggaattcgctgaatggcgtattggtgaaggtgatcaccgcatggtgggagtaaacagacgaaccgtgtggcaccaccagttgcccccttgatttggcgattgcggcaatttccaccagcgtggttaagccaccgcaccagccaacatccggctgcataatgtcgataccggtttctgaaagcgtacggaaagattgcagtgtgccgtggtgctcaccgctggtgaccatcatccccgctggtgcgttgtgtttcagttcgcgataaccttcatactgctgtggcggcaggcactcttcgatccatttcaggttatagggcgcgcaagcgtgggccagtttgatggcatagttcacgtcctgactcatccagcagtcgagcattaaccagaaatcctcaccgcatttttcacgcatatccgcgaccatagcggcatctttgcggatccccgcatcaccatcatgtggcccccagtgcgtcggcattttgccaccgataaagcccatctcttttgccagatccggacgcgcacctgtggcgtagaactgaatttcatcacgaactgcaccacctaaaagtttataaaccggaagcccgaccactttgccgaacagatcccacagagccagatcgacacaggaaatcgtattcatcaccaggccaccagagccggagtaatacagggtggcattgagcatttgatcgtggatcagtttgatatcactgacgcatttaccctcaatgaaacggttaagatgtttttcgacaataaaacagcccatttcaccggctgtcgaaacagcgaatccggtctggccgttttctgcttcaacttcaacaatcaacgtgccaagaacgttaatgccaaatgactggcgtgactgctcgtaatcgcggtatttactcatcggggtggcaatatgatcatcaatccagtgattcgccccctggtcgtgataatcaccgccgccagcgcctttttctgctgtcgcaccgccagtaaaccaggcgcgaacctgtttgatttttggtagggtcatgatgttctccattgttatgaggcctgtaagtcaaagggacttttccatcccaacaaacgtgaaatatccctggcgcaggcaatagccttgcccgccagataatcacggtattcttcattgatttgtaagcgggtaccgaccaccgaaatcgcagcggtaagctcgttattggcgttaaacaccggcgcagcgacacaacggacatcggcataatcttcgccgttgtcatagctccagccctgacggcgaatacgcgccagttcctcgtagagccgttgtggatgggtaatggtggtgggtgtcatctgctcccagaccagctcttcgataatacttttctgtacagcttcaggttgccaggcaagcaggcatttacctattccggagcgataaagcgaaaggctttttccttcatgggaacgcacgctgatagtggctgatgactccactttcaaaatgtaataagcgctgccgttatcaataatccccaggtgacataacagcccggtggtatccatcagttgcgtcaaacgcggtcgagccagttcccggagatccatcttgcttaacgcatgaccggaaagctccaccagcctggtccacaaacaaaaattttcctggtgatcaaggctaagaaaacgctgacgcctgagttcattaagcagcaaataggctgtgcttttagggatccccaatgtgtcaatgatcgtcgcagcactacaggggccaatccgggcaatcaaattgagaatatcaatagcccgtgtcagggcgggaactttgcttgattccaacatactggactccagtcttagatactggaatcagtctcgttgctcagggggagtaaaattgtgaagcgcatcaaatcccgtttctcgtccagcggactggagaaattacgcacaaatttgtgaatcagcgcacggattttttcttattgagtacaacaggttggacaaattttgccggagggggaatgtgccggtgcagtaaaccggcacagagtggcggaatcagacagataaggtcatggactcaacaacctcaatccagccatgctcgctggcgatgtcctggccgtttaaccaacggcgtagcatattaagcgccatcattgcgcagacttcctggcgaatagccagactgtagcgtgtggcactgaaatgtacacgcaaagcgaaagtgccgtctggcgtggctagtgcaaagttgagatgctcatcttccagaccagaaacagccagtgccaacccagcaaaatggttcgcccgccgttctgtaatccagtgcgcagtttgcgccagggtttcctcctgtgaaggaaccacttcacacgccagcaatggagcatctgcgcgagaaagttgcaaagccaataaaccaccggtgaattgctcgctcagcgtcaggctgaactggcggctctgcaattcgcgactgatctgcgcgggcagtccttcggtgccttcgaaaatcacgctctgtccggcaacacgtttaacgtccagccacagtttttccatcgcctgttcctcgcttgccggtccggtgagtttcagttcgataatcggcattgaggagcgatagcccattgttacgcccggcggcagttgtagagtgtccaggctttgtgccagatcgctttccgaacgaccaaaggtagtcaaacgcaggcaaaccggcggctgtggtaaagaaaaacgctcgcgcaggcgcggcaggatttcgtgctcgaccatcaccttaaattctgacggtacgccgggggtaaagaacatcaggcaacgattaagctgtatggcaaaaccacaggcagtgcctaccgggttattgataaattcagcactggcaggcagctccgcttgtttacggttgctcggtgccattactcgtccccgttcatggaaatagcgttccatctctttgagccaggcttcatgcagcaccaggccttcaccttttgctgtcgcagcggcgagtgcgcttaaatcatcactggtcggtcccagcccgccgttaacgatcagcacatcggcgtgctgactacgttcgcgaagaatggtgactaagtcatcaagattatcccccaccgtattgcggcgagataatggcagcccctgatgaaagaaaaaatcggccagccaggcagcgttagtgtcaacgatttgcccgtgtaacacttcatccccggtggataacatttccacttttaacatggttatctcctgcttttgttatcgaatcactataacgcaaagggagacagggcgtagtaagaaactgaatggcgcgacagaacgccgcgccggaaggcgtcagaagctggcatttaccccaacatacggaccatcagcaatggcgttatcacgattgccatttttacctgccaggttcaggtaacggtagccagcctcaatgctgactggacgcataatggtgtaacgcgcgccagcattcgcttcttcataacttttaattccgctggagagcgaatccggagagtagtaatactcaccaaacaagcggaagctgtcaccaatttgccactgcaaaccaccgccaactgccgctgcataaccttcatcaccatcgttcgggttggtgtaaacgccttttccgccaacggtcgccattaatggtccgagaggcagattcaaccccagccccacgcccgcggcatcaccgtcgtcgtcgttatgtgtccagttaccgcttaacgccaggcccgtcgattcagtcccaaaaccgacaccaatattggtgtattctttacccgcctggccgctgatgctcattgcattgaccgatgcagaaaccaacagcattccggccagacctgctagcgcaatttttttcattatcccctttcccacaagcaattaattaaaattcccaaagctgcgggattgtactgcctggcgcagaggattcaatgagcgaaaaaagggatctagtcacttattgtaactaaatacttcttaaataattaaacgccgaaaaaataaacacactttatcgatacacacaaaaataataataaatgtagttatcatcgcaaaagagattactgtcactttcacatatttctgagttaccgtattctcatggtttctttttatttataaggaatacccctgtgcgacaacggactattgtatgccctttgattcaaaatgatggtgcttatttgctgtgtaaaatggccgacgatcgcggcgttttccccggtcaatgggcgctttcgggtggcggcgtggagcctggcgaacgaattgaagaggcactacgccgcgaaattcgcgaagaactgggagaacagctgcttttgacagaaatcacgccgtggaccttcagcgatgatattcgcaccaagacgtatgcagatggtcgcaaggaagagatttatatgatttacctgatttttgactgcgtttctgccaaccgagatgtgaaaataaacgaagagtttcaggactacgcgtgggtaaaacctgaagatctggtgcattatgatttgaatgttgccacccgaaaaacgttacgtttgaaaggtcttctttaacaatgatgacagccatcactggctgtcagattgaaaatttagtggttaacgaattccccatccagataaactttgcctttttccacatgcatgactaaaccatccagataatcaggtttaaatgtcgcatcacgcttatctttagcaatatatgtcaggcaatgattatgggtaaaaataacgatatttttatcaggtgctttgcgttgtaagtctttaattgcactataaatctcattaccgcattgaagaaatcgtttatctaccgtcagctttttacccgccgaaaaccaggtcgccgactgaatagtccggacggtattactggaatagagatcaaaatcagggatatcagcactaaaagcgttgcccagttcacgggcatcctgggtacctttgaccgtaatacctgttttatctgacaagcattgattggttgaacgatcgcaacgttcagcatggcgaaacaaaacgacaaccgggtgctgctgtgccagtctggccagtgttttattgtcgatgcgtggcaaaccattgctactccaggcggcatgagtacccagtccggcaatcgcagcgagcgccagtaaaatgatgaaatatttttttgacttcaacgaagatcggcaaaaagctaacacgtaaactccacctgtagacaagcgcaaccagacaattaccgtgaaattgagcgacttttctggcgataattagcagttggtgtaatattaaaaatcctatgatgccggcaaaatgcctcaaaattttgccaaatgcaaagtctaaataagaaaaaatataaaaatttcaatatttacgtctaatattagtttcttaaggttaagttaatattctatccttaaaattttgctccaaatggcaaaatatgcacaacactctttatagcaaatataagtggacaggtattcaatgacggatggaaaaaaaatgtcaggatttttgcctttttcgcgaccagcaatgggcgtagaggaactcgctgcagttaaagaggttctcgaatccggttggatcacaaccggtccgaagaatcaggcgcttgaacaagctttttgccagttgacgggaaatcagcatgccatcgcggtcagttcagccaccgccggaatgcatatcacgctaatggcgttggaaattggcaagggcgatgaagtgattacgccttccctgacctgggtttcaaccctcaatatgatttccttgctgggtgcaacgccggtaatggtggatgtcgaccgcgatacgctgatggtcacgcctgaagcgatcgaagcagccattacgccacgcactaaagccatcattccggtgcattatgccggtgcgccagcagatattgacgccattcgcgccattggcgaacgttacggcatcgcagttatcgaagatgctgcccatgccgtcggtacgtattacaaagggcgacatattggcgcaaaaggtactgctattttttcgtttcacgccatcaaaaatattacctgtgcggaaggtggcctgattgttactgataatgaaaatcttgcccgccagctgcggatgctgaaatttcacggtctgggtgtcgatgcctatgacagacatacctggggccgtgcaccgcaggctgaagtcttaacgccgggctataagtacaatctgaccgatattaacgccgcgattgccctgacacagttagtcaaattagagcacctcaacacccgtcggcgcgaaattgcccagcaatatcagcaagcactggcagctctcccctttcagccattaagccttcccgcctggccgcacgttcatgcctggcatctgtttattattcgtgtcgatgaacaacgttgtggtatcagtcgcgatgcgttgatggaagcgttaaaagaaagaggcattggtaccgggttacatttccgcgccgctcacacacaaaaatattatcgcgagcgttttcccacgctgtcgttaccgaataccgaatggaatagcgaacgcatctgttcgttgccgctgttcccggatatgaccaccgccgatgccgaccgcgtcatcacagcccttcagcaactcgcaggacaatgagccatgtttgaaatccaccctgttaagaaagtctcggtggttattcccgtttataacgagcaggaaagcttaccggaattaatcaggcgcaccaccgcagcctgtgaatcactggggaaagagtatgaaatcctgctgattgatgacggcagtagcgataattccgcgcatatgctggtcgaagcctcacaagcggagggcagccatattgtgtctatcttgcttaaccgcaattacgggcaacattcagcgattatggcgggattcagtcacgtcaccggcgacttaattattaccctcgatgccgatctccagaatccgccagaggaaatcccccgtctggtggcaaaagccgatgaaggttacgacgtggtagggactgtacgccagaaccgccaggacagctggtttcgtaaaaccgcttcaaagatgattaaccggcttattcagcgcaccacaggcaaagcgatgggtgactatggttgtatgctgcgcgcctatcgccgtcatattgtcgatgcgatgttgcactgccatgaacgcagcacctttatcccgattctggcgaatatcttcgcccgccgtgccattgaaattccagtgcaccatgccgagcgtgagtttggtgaatccaaatacagctttatgcgcctgattaatttgatgtacgacctggtgacctgtcttaccacaacgccgctacgtatgctgagtctgctcggcagcattattgcgattggcggttttagcattgcggtgctgctggtgattttacgcctgaccttcggaccccaatgggcggcagaaggcgtctttatgctatttgccgtgctgtttacttttattggcgctcagtttatcggcatgggattgctcggtgaatatatcggcaggatctacaccgatgtccgcgcccgcccccgctattttgttcagcaagttatccgtccatccagcaaggaaaatgaataatgaaaaccgtcgtttttgcctaccacgatatgggatgcctcggtattgaagccctgctggctgccggttacgaaattagcgccatttttacccatactgataatcccggtgaaaaagccttttatggttcggttgcccgactggcagcggaaagaggcattccagtttatgcgccggataacgttaatcatccgttgtgggtggaacgcattgcccaactatcaccagaggtgattttctctttttattatcgccatcttatttgcgatgagattttgcagctcgctccgagaggtgcatttaatctgcatggttcgctgttaccaaaatatcgtggtcgcgcgccgctgaactgggtgctggtgaacggtgaaacggaaactggcgttacattgcaccgaatggtgaaacgtgccgatgccggggccattgtggcacaactgcgcgttgccattgcgccagacgatatcgccattacgctgcatcataaattgtgccatgccgcgcgccagctactggaacagacattacccgccattaaacacggtaatattctggaaatcgcccagcgcgaaaacgaagccacctgttttggtcgcagaacgccggatgacagtttcctcgaatggcataagtcggcatccgtactgcacaacatggtgcgtgccgttgccgatccgtggccgggtgccttcagctatgttggcaatcagaaattcaccgtctggtcgtcgcgtgttcatcctcatgccagcaaagcacagccggggagcgtgatttctgttgcaccactgctgattgcctgtggcgatggcgcgctggaaatcgtcactggacaggcgggcgacggcattactatgcagggctcgcaattagcgcagacgctgggcctggtgcaaggttcacgcttgaatagccagcctgcctgtgccgcccgacgccgtacccgggtactcatcctcggggtgaatggctttattggcaaccatctgacagaacgcctgctgcgcgaagatcattatgaagtttacggtctggatattggcagcgatgcgataagccgttttatgaatcatccgcattttcactttgtcgaaggcgatatcagtattcattccgaatggattgagtatcacgtcaaaaaatgtgatgtcgtgttgccgctggtggcgatagccacgccgattgaatatacccgcaacccgctgcgcgtatttgaactcgatttcgaagagaatctgcgcattatccgctactgcgtgaagtaccgtaagcgaatcatcttcccgtcgacttcagaagtttatgggatgtgtagcgataaatacttcgatgaggaccattctaatttaatcgtcggcccggtgaataaaccacgctggatttattcggtgtctaaacaattacttgatcgagtgatctgggcctatggcgaaaaagaaggtttacagttcaccctcttccgcccgtttaactggatggggccacgactggataaccttaatgcagcgcgaattggcagctcccgcgctattacgcaactcattctcaatctggtagaaggttcaccgattaagctgattgatggcggaaaacaaaaacgctgctttactgatattcgcgatggtatcgaggcgttataccgcattatcgaaaatgcgggaaatcgctgcgatggcgaaattatcaacattggcaatcctgagaacgaagcgagcattgaagaactgggtgagatgctgctggcgagcttcgaaaaacatccgctgcgccattacttcccaccgtttgcgggctttcgtgttgtcgaaagtagcagctactatggcaaaggatatcaggacgtagagcatcgtaaaccgagcatccgcaatgcccgccgctgcctggactgggaaccgaaaattgatatgcaggaaaccatcgacgaaacgctggatttcttcctgcgcaccgttgatcttacggataaaccatcatgaccaaagtcggcttacgcattgatgtcgatacctttcgtggcacccgtgaaggcgtgccgcgtctgctggaaatcttgagtaagcataatattcaggccagcatttttttcagcgtcggcccggacaatatgggccgccatctctggcgactggtgaagccacagtttttgtggaagatgctgcgctcaaacgcggcatcgctttatggctgggatattttactggcaggtacggcctggccaggtaaagagattggtcatgccaatgccgatatcattcgtgaagcggctaaacatcacgaagtcggcctgcacgcctgggatcaccatgcctggcaagcccatagcggtaattgggatcggcaaacaatgatcgacgatattgcacgcggccttcgcaccctggaagagattatcggtcaaccggtaacctgttctgccgctgctggctggcgtgctgaccaacaggtgatcgaagcaaaagaagcgttccatttgcgctacaacagcgattgtcgtggggcgatgccgtttcgtccattgctcgaatcaggaacccctggcactgcgcaaattccggtgaccttacccacctgggatgaagtgattggtcgggatgtgaaagcagaagattttaacggttggttactcaaccgcatccagcgagataaaggcacgccggtttataccattcatgccgaagttgaaggctgcgcttatcagcataattttgtggatctcctgaaacgcgcagctcaggaaggcgtgacattttgccctttaagcgaactgttatcagggacgttgccgctcggacaagttgttcgcggaaatattgccggacgtgaaggctggctgggttgccaacaaattgcgggtagtcactgatgaaatcggtacgttaccttatcggcctcttcgcatttattgcctgctattacctgttaccgatcagcacgcgtctgctctggcaaccagatgaaacgcgttatgcggaaatcagtcgggaaatgctggcatccggcgactggattgttccccatctgttagggctacgttatttcgaaaaacccattgccggatactggattaacagcattgggcaatggctatttggcgcgaataactttggtgtgcgggcaggcgttatctttgcgaccctgttaactgccgcgctggtgacctggtttactctgcgcttatggcgcgataaacgtctggctttactcgccacagtaatttatctctcattgtttattgtctatgccatcggcacttatgccgtgctcgatccgtttattgccttctggctggtggcgggaatgtgcagcttctggctggcaatgcaggcacagacgtggaaaggcaaaagcgcaggatttttactgctgggaatcacctgcggcatgggggtgatgaccaaaggttttctcgcccttgccgtgccggtattaagcgtgctgccatgggtagcaacgcaaaaacgctggaaagatctctttatttacggctggctggcggttatcagttgcgtactgacggttctcccctggggactggcgatagcgcagcgggagcctgacttctggcattattttttctgggttgagcatattcaacgctttgcactggatgatgcccaacatagagctccgttctggtactacttgccggtcgtcattgccggtagcctgccgtggctgggattactccccggtgcactgtacgctggctggaaaaaccgcaagcattccgcaaccgtctatttgttgagctggacgataatgccgctgctgtttttctccgtcgctaaaggcaaattgcccacctatattctttcctgctttgcacctctggcaatgctgatggcgcattacgcattgctggctgcaaaaaataatcctctggcgttgcggattaatggctggattaatatcgcttttggcgtcactggcattattgccacatttgtggtctccccctggggaccaatgaacacaccggtgtggcaaaccttcgagagctataaagtcttttgtgcctggtctattttttcgctatgggcatttttcggctggtacaccttaacaaacgtcgaaaagacctggccttttgccgcgctttgcccgctggggctggcgttgctggtaggattttcaattcctgacagagtcatggaaggaaaacatccgcaattttttgtcgagatgacacaagaatcacttcagccaagccgctatattcttactgatagcgtcggtgttgccgcaggtctggcatggagcctgcaacgcgatgacatcatcatgtatcgccagacaggtgagttgaaatatggccttaattatccggatgcaaaagggagatttgtcagcggtgatgagttcgcaaactggcttaatcaacatcgtcaggaggggattattacactcgtgctttcggttgaccgcgatgaagatatcaatagtctcgccattccgcccgcagatgtcatcgatcgtcaggagcgtctggtgctaattcagtatcggcccaaatgatctggttaacattagtctttgccagcttgcttagcgttgccgggcagttgtgtcagaaacaggcaacctgctttgcgacggtaaacaaacggcgcaaacatatcgtgctgtggctgggactggcgctggcttgtcttggccttgcaatggtgctctggctgctggtcttgcagaacgtaccggtaggcattgcctacccgatgttaagtctgaattttgtctgggtaacgctggctgcagtaaaactgtggcacgagccggtatcgctgcgtcactggtgtggggtggcgttcattattggcggcattgtgatcctcgggagtacggtgtagtgggcctgatgtggggattattcagcgtcattatcgcctccgctgcgcaattaagcctgggttttgcggcgagtcatctgccgccaatgacgcacttatgggattttatcgcggcgctgttagcttttggcctggatgcccggatactgttgctcgggctgctgggttatctgctttccgttttttgttggtataaaacactacataaacttgcgctaagcaaagcctatgccttgctcagtatgagttatgtgctggtatggattgcttcaatggtacttcccggctgggaagggactttttcgctgaaagcactactgggagtagcctgtattatgagcgggttgatgctgattttcctgcccacaacaaaacaacgttactgagttttccctgccgctttacactgccgttcccactcatcggggctataacagcttgcagaaaggactttcaccgtgtgcagcttttcacgattaatacagtaaagcgcattctgcaaaggcgagagtaaatcccccactttcacggcgaagtcactcttcacttcggcgatcatttttatcgcgccgccagcatcgcagagcataattacatgtctgttatcttgtttattgcagcacgattttttgaccagccattccattgcattatcctgtttgctaagagttttcacatcaatttacagattaacagataaactctttatcaacggcaatggaatggcagaaatgagaagtgaaacggagggttaattattgctggcgtttcacccactcttttagcgcctgacgtgaaattttaataccgccgtttttcagctccggcggcagagtcagccagcgcaccggttgttgaaaacgagccagcttatctttcacccattcgtcaagatcaacgctttgctggtcatactccaccaccgctaccggccgatgaccaaactccttgtcggcaacgggaacgataaacacctgcaaaaccgcaggatgtgcagcaataacgcgctcgacttcttccggctgaataccctcaccgccactgaagaatagattgtctaaacgtccgacaatggtcaacttgccattatacatctcaccgcgatcgcgcgtggcgtaccagccttcgtcattaaccagtggaacccgttgcccattacgccagtaaccttctgccatactggcagcccgcagccacacttcatcattaacgattttcacttcccgacccggcagcggcgaaccaacgtctgccagaccgtcggcttctttcgcacacaccgtggaggcaaactcggtcagaccatagccgcaaaagcaccgaatcccctgctcgcgcgcctgttccgtcaactcgaccgggatagccgcgccgccaagtaaaaccgctttcagggaaacggaactacggttaaccagcaaacgccagagttgtgttggcaccagtgaagcgtgagtacaacctgccagcatttgctccaatggctgtttatcacgcaccgtcatccgcgcaccagcgtataaccagcgccacataattccctgaccggagacgtgaaacagcggtaaagagagcaaccagtcatcgtgatcaccaaaaggaatcagcgataacaccccttcggcgctggcaagatgagcctgataagtatgaacagcggctttcggcaagccagtggaaccagaggttaacgtcattgagcacagacgcgtcggctgccacgccgcggcatgtgcgccttcaaccagctgaatgtgcagcgacgctaacgccggaaacgtgttttccccttccggcaccagcgcaaattgcagcgtaagattgggcagcaattcctcaagcagcggttgcggcagctgagggttcacgggcaacacccgcgccccgcattgcagtaacgccagccaggccagcagcgtttgcggcgtattccacgcccgcaacatcacgccgctgccctcaaccacaccctgcaccgcaaagctggaggctaattcatcgacgcgagcacaaagctcgcgccagttgagttgctcgtcattgagacgtaaggcgatggcttctccccgcacttgccgccagtgacgccacggccagtcagagaagatcataacagctgctccagtgcatcaacgtccactaacggcagcaggctccccggccagcgacgaacctgctgcgcctgcatcagatccagcgtgtccagtcccggaatggtgtctggcgttaaccaggcagcaatccgcgccagttgcgttagacctaagctcgactcaatggaagaactgatcaccgccgtcagccccagcgcatgcgccgcctgcacttgctcgcgtactttatccaggctgcccgtgagcgtgggtttgataactaccgcgcgcacgccctcttcagctacaaaggcaaaatccggctcgcgcaagctttcatcccaggcaatggcaatgccggtttcacgggcaaacgcacgcgaatcatcgcgggttttgcacggctcttcgagaaacgcgatgcggtggcgataatccgggttaacgtatttggcaaactgctggcctttcagcggtgtccaggcgcggttcgcgtcaagacgcaaatgcagatcaggaattgcctccagcaacagattcaccaccatgccgtcgcgcacggcttcgtacaatcccactttgaccttcgccactttctcgccaggcatatcggcaagtttgaggatcagatcgtcaggatcgccattacacagcggtgccgcacggtaattggccgcctgcgggagcgtatctgccagctccgccaatgcacaacttacgccaaaggcaacggaaggcatctgcggtaattcgcaatcgcctgccagccagttatttacccaggcaagcagcacactttgcgcctcttcccaggtttcctgactgaagcccggcagtggggagatctccccccacccttcgcgctcgccctcacgcaggcaaacatacagcccgtcgcgggtttttaaccgcctgtcgcgcagaaccacccccgcgtccatggggatctgccagcggtatacctgcgcgctacgcattacggattccgtttaaatttgctgaaatcaggctgacgtttctggttgaaagcgttgcgaccttcctgaccttcttccgtcatatagaacagcatggtggcgttgcccgccagctcctgcagccccgcctgcccgtcacagtcggcgttcagtgcagctttcaggcagcgcagcgccatcgggctgttttgcaacatttcgcggcaccaacggacggtttctttttccagatccgccagcggtacaacggtgttcaccagacccatatccagcgcctgtttcgcgtcgtactgacggcacaggaaccagatttcacgcgcttttttctgtccaacgatgcgagccatgtaggaagcgccccagccgccgtcgaaggaaccgactttcgggccagtctgaccgaagatggcattatcagccgcgatagtcaggtcgcacatcatgtgcaggacgtgaccgccaccgatggagtagccagccaccatcgcgacaaccggttttggacaggtacggatctgacgctggaagtccagcacgttcaggtgatgtacgccggaatcatctttatagccgccgtaatcaccacgtactttctggtcaccaccggagcagaacgctttatcgcctgcaccagtcagaatgatcacgccgatgttgtcgtcataacgcgcatccgccagcgcctggatcatctcttttaccgtcagaggacggaaggcattgcgcacctgcggacgattaatggtgatttttgcgataccgtcggtggatttttcataacgaatgtcctcaaaaccttcggagcagtcgtgccattcaaccggtgcgtaaagcattgcttcatcaggataaatcatattgtgtcctttagtcagaaacgcaagatctgcgccagacttgcgattacgccagcgggattttcccggtgcgcgttatgtccggcgcgaggaatgacatggcagtcggcagccagttccgccgccagagcgcggaatttgctgtcacgttcaccacataaataataaaacgcaaatgtgcgggcgctaaggttagcacgtaaatcgggctggacggcgagagaagtcgcctccagcatggcggcaagggttgcgccattattgttgctgcgcagcgccaccagctcccggcgttgatcgtcattgagcgaggcaaaaacaggctgttgataccaatcggcaaataccgccgttaacggttctgtacgaaaacgctgcgcccattggcgatcggaacgctgacgttccgcgcgttgttcagcattttgcaatccaggatgcccgccttcgacaacaactccacaaagccccgccagctcctggcaagccgccatcatcgccacccgtccgccaagcgagtaccccaccagccagaagttaaggatgttgtaactaaccagcgttttacacaataagccggtgacatcatcaaatccatcgacgctgatcgtcgctgaaccaccgtgacctgggagatcaacatacaaccgcgagtagtcggcaaacgcctcgcccacttcttgccattcatggcaatcgccagaaaaaccgtgcaaaaacaccaaccagggtaaacctggtttgccgtgttttgcctgcgcgtgcaggatcataaatggcttacctgcgccagaagttgctggagcgtttgcgcaccatcggtgtcgttaaccaccatttcaatcaccgtggtggtcggcgtacgccaggcatcgactagtgtcgtttcaagttcctgccagttttgcggacgatgatatttcagctcgaacatcgcggcggcgtgctcaaaatggacgttttgcggcatcagatagaaacgctcgcgctcgcttttcggcgttggcaacagcgaaaaaatttgcccgccgttgttgttcaccacaattaataccagcggtgcggaaacctggcgcaataacgccagcgcgttgagatcgtaaagtgcggagagatcgcccacaatcgccagcgtcggtttgccgcttgcccgctgaacgccggcggcagtcgagagcagcccgtcgataccgctggcaccacggttgctgtacaccgggtaacctgccggaagttgcgaaagcgcatcaatcagacgcaccaccaggctgttaccgacaaacaattgcccctgttcaggcaagtagtcgctgatgcgatgcgccagttgcgcttcgccaaacgcatcgcgacgggcaataaccgcctgcattgcctgttccgccaggcgcgggatttcaacgcaccagggctggcgtttttctgccggatgcagctccagccagtcggcaatattggcaattaagcgacgtccgcgatggtgtgccggatcaagtcgcccttcaatgtcatcaacaatccagtactcttctggttcacagcttgcctgccattggaggagtcgtttccccgtcaggctgcttcccagttgcaccactatttgtgcctgttgcagttcgctggtcgctttggcattgcctaaccagagatcggcacacggcagcggctgtccggtttgcgacagcacgtcgccaatcagcggccagccaagagtttgcgcccacagtgcaacttttttgccctcttccgcactcatgcgcccggcaaccaccacgccgcgcttttgtcgccagaagaaccagtcacgctgtttttcactttcccgacgaggcgcttcacgcagccacggtttgtcgtcctgccaccagtcgcccagccgctgttgccagctaatcccggtgtcgtccatttcgccatacagcggttcagcaaacgggcagttgatatggactccaccagcatgaagcgtaccgagagcgtggtcgatggtagaaaccagccaacgtgcggggatatcctgggtcgggcgcggcagtgaaatactgtgcgtggggtgagaggcgaacattcccggctgacgaatcgcctgattcgcgccgcagtcaatcagctccggcgggcgatcggcggttaacaggatcagtttttctccggttaacccagcttcaatcagtgccggatagagatttgctaccgccgtgccggaggtcacaatcaccgccaccggctgcttgctgactttcgccagccccagtgccagatgccccagtccacgctcatcgaaatgggtatgatgaataaatgcggaattctccgccgccgctaacgttaacggtgtagaacgcgagccaggggcgatacagatgtgtctgacgccgtgacgcgttaatgcttccagaatgaccgccgcccagcgtcggttaaatgcgcttactgacatgagtttgtccggtatcaatattgcggctaagtataaggagctacaaaaatagattattgatatgaatcggtaatgatgcgactcattactattccatttgtaataaagtacgcagccctgccgctttgttgtcgatttcctgccactcttgctcggggtcggaaccacggacaatgcctgcgccagcatatagccgcacgatattgccgctgatttttgctgagcgcagggaaacgcagaattcactttgctgtaatgagagatagcccgcagaaccggcgtaccattctcgagtgaacggttcgtgacgggcgataaactgtcgcgccagatcgcgcggtaagccagcaactgctgccgttggctgcaactgatgtaaacagatcacatcatccgctttgttgagtgaagtccagatacagcggcgaagatgctgtactttacgtagacgcagtacctgcggcggtaaaacatccagcgtttgggtatcggcctgcaatcgttggcagatatcttccaccaccaacatgttctcgcgctggtttttatcatccgccatcagccactcacctaactgctgcgcctgcttatcatcaggatgatttgctaccgttcccgccagcgcttcggtacgcagcgctttgtcacgccgccgccataaccgttccggtgaagaaccaagaaaagcattttcgccatcaaaggccatgtaaaaatggtagcaattcagattgagccgacgactggcagccatcatcgctgccgcattgaccggacttgcgaaatgcaggtcggttgcccgagcaagcacaactttgtcgagctcgccttcggcgatggttttcgttgccagttcgattaattgcgtccagcccgttttgtccggccagtgttgttctcgcgtggtggtaaaatgtaatccaggcaagggcttgatactcaccagtgtggcgataaattcttttgccttgattgcatcgtgctgaagggagctttcgctgaatagcgtcagccgcagcgtggctttaccgccacaacgtcgccattccaggcgtggtaaaagtaaattgccctgcgacgggtcaaacgcattcaacccccagatgcgtaagtcggcgtgttccgggtgctggcgaagaaaccgttgtgcctggtccaacgacgtaaaacgggttatcgcacccaggacggcagcttcttcatcaccattacgttgttgccagtagaattgcgggtacgtttgctgactggccagccagctcaaggcatcaaaagcgtctttgagagggaaaggaatatcgataacccgaatgccgggtgtcgccggaatctcttgcgacaaatggcgcagtagattttccagcgccgtagtaagtgattgcacgcggacctctccctgttaaaagcctcacattatacggggtacgacaaaaaaaatgcagtaccccggtgtagggaggttttaacggcgtgccagcaacagtcctagaaccagcccaacggccgcacccacaccaattccttgccagggtttttcgtggacgtagtcatcagcacgataaacagcctgcttcgcccgatagtaataactgtctgaagcctggctaacccgttttttcacatcatccagcgctttttctgcacgcgctttcagctcaacatatttctgatcggcgggatcgccagaggagcggagcacctcttccagtgtttcactaagcagcgtcaggtcatcatcaatacgtgtatcaccaaactgattagacattctcgttctccatttgtgtaaaacctgtcactaactatagacaagggttattgattacgcctgaattacctcgcgtgccatcccaatgtgtgggataccatcttcttcataaatatcggtcacagggatgaaaccaaattgcccataaaagttttgtaaatgcgcctgcgcccccagataaatcggcttctccggccagcggcgagtacacgattccagcgccttactcatcaattgctgaccgattttttcaccgcgtaaggcttcgctgacaatcacccgaccaatcacaacgggttgcagttcgtcgtcacttttcagaatcctcgcatacgccaccagtgtcccgttatgccaaccgagaatgtggcgattttctccctccagatcgtcaccatcgatatcctggtaaggacagttttgttccactacaaataccgcacaacgcagttgtaataaggcataaagctgagaaacggataaatcagaatgatgcagatcttgccagtcgatcatggaaggctcctttgtgctgtttgctttatactagccggaatattttcagcagcgtgatgaactcatggaattaatttttttaggtacttcagccggtgtgccaacccgtacgcgtaatgtcacggcaatattgcttaacctgcaacatccgacccagagcggactttggttatttgactgcggtgaaggcacccagcatcagctactgcataccgcctttaaccctggaaaactggacaagatttttatcagtcaccttcatggcgatcatctctttggtttacccggcttactgtgcagtcgttctatgtcaggcattatccaacccttaacgatttatggtccgcacggtatccgtgaatttgtggagaccgcgctgcggattagcggctcatggaccgattatccgctggaaattgtcgaaattggtgctggcgaaattttcgatgatggcctgcgcaaagtgaccgcttatccgatggaacacccactggaatgttatggttatcgtattgaagaacatgataaaccaggtgcattaaatgcccaggcattaaaagctgctggcgtgccgcctggcccgctgtttcaggaattaaaagcgggcaaaacaatcatgctggatgatggaaggcagattaatggcgcagattacttagccgttccagtgccgggtaaagcgctcgctattttcggcgataccggcccctgcgatgccgcgctggagctggctaaaggcgtcgacgtaatggttcacgaagcgactctggatatggcgatggaggccaaagccaacagtcgcggccatagttctacacgccaggcggcggcactagcccgtgaggctggagtcggtaagctaatcattacccacgtcagctcgcgctatgatgacaaaggttgtcagcacctgttacgtgaatgtcggtcaattttcccggcgactgaactggcgaatgatttcgcggtgtttagcatttaagtcgaaagcggtggttagttagcagattaatttaacgataccaacgcatttatttgacattttttcatctgtttgccggatacgtttgatgtcgatatcaggcaaacagaattatcatttttagttttgtgaattgtccagatctttcgccagtccaatcaggcgaataaattccgctctgtaaccctgtggatcttccccttttgccttctgagcccactgtttgatctgctgccaggaggtattattcaggtattcagaaccgcgtaacttttgcccatatgcagccactgctgcgcgaaaacgcatatcttctgaaggtgcctttattgcgaatgccaacgggaattcaactaactgactttcttttccctgtggggatttccaacgaatctttaaccaggcaagttcttttgttttgtccgatttcgctgatttgttatccggggcatagcgtaacttatcaattgatgctttttgccctttcagcgttaattcaaataaaaatgttatatgtttacctgcgccaatatcacccgcatcaacgttgtcgttattaaaatcctctgccctaagttggcgcttttcataacctatctgacggtattccgttacccacgcggggttaaactcaatttgcgctttgacatcttttgctacggtaatcaacgtctgccgcatttcactgttcaacactttctgcgcctctgagagggtatcaatgtagctatagttgccgttaccaacatcggcaattcttaccatcattgcctcgttataattgctatcccccacgccaagcgtcgacagagtaacaccggactcacgctgttttttgaccattgattcaatcgattttggatcgtcaatgccaacgttaaagtcaccgtcagtggccaataaaatgcgattgataccacctttaataaaccccttcgctgcctgctgataagccatctccagcccggcaccgccattggtactgccttctgcatccagcgaatcaattgcagcattaatttccgccttgtgactaccggagatagaaggcaacgcaatacgagagtcgccagcgtaggtcacgatggcaatgttatcctgctcacgaagttctttgaccaataatttcaacgaagactggataagtggcaaacgttcatcagaaatcattgaaccagacgtgtcgataagaaagaccagattagaagcgggtaactcttcacttttgcgatctttcgccaggatatcaactttcagcaatgttcgctgttcattccagggtgcaggtgccaattcgtagcgcatagcgaaaggtattggcttagaggccggaatagattgtttgtctttgatatcccagtcagacgggaaataattgactatctcctccacccgcacagcgtctggcggaggtaacagcccttgattaaggaaacgccgcacattcgcataactgccggtatcgacgtcaaggctaaacgtcgccaacgggttttgcgctacctgcttaaccggattatcatcgaactgctggtagcgagcggttcctggatttgcgatttgggaggctgctttttctctggctgcatgttgatattttggagccgcctgcaatcgccccagcaaagcctgtttgtctgaatattgttgcacttcttgctgggctaaggctttcgcgtctgcagcggctttggcggcgctttgctcagccacttttgttgccgcttgttgcgcggcaagcacttgctggtcagtgggtgtagtagattgttgttgctgacttttcttatcctcaggttccggcccacatcctgacaaaatcaaactacttataagcaacatgattatatttttatttcgcatataaaatccttttaaataaattcagggccccgacataaaatacactctttgtataatcctgctaatcttaataaaatacaatatcgaaacccataacaaataatgattcaacaacgcaacccattaataatttgcatatgaaaaaaaataaattttgcttttattatattatttctgttttcactccctctgattattttttaccaaccctgggtgaatgcattaccgccaacgccccgacacgcaagtcctgagcaattagaaaaaacagttcgttatcttacacaaacagtgcatccacgtagcgccgacaatattgataatctgaataggtccgcagagtatataaaagaggtctttatcagtaacggtgccagagttaccgcgcaggatgtccccattacgggtggcccctacaaaaacattgttgctaattatggtcctgccgatggaccgctgattattattggtgcgcactatgactctgtcagtagttatgaaaacgatcaattgacctatacgccgggcgcggatgataacgccagcggcgtggcaggattactcgaactggcacgtttgttacagcagcagactccagggattggcgtccaactggtcgcctatgcgtcggaagaaccgcccttctttcgtagcgatgaaatggggagcgcggtacatgcagcttcgcttgagcgtccagtgaaattaatgatagcgctggagatgattggttattacgactctacgcctggtagccaggattacccttacccggcaatgtcctggctttatcccgatcggggagactttattgccgtggtcggcagaatgcaggatatcaacgccgttcgtcaggtaaaagcggcattgttgtcatcccgggatttatctgtttattctatgaatgccccaggttttattcccggtattgatttctctgatcaccttaattattggcaacacgatattcccgccgtaatgattactgacaccgctttttatcgtaataaacaataccacttgcccggtgatatcgcagacagattaaattatcagaaaatggctcaggtagtggatggagttacaaccttgttatacaacagtaaataataaaaatttctcgaggcggatccagaaaaagcaacatgcgcattttattttctttcgtctgttttaagatgcgaaacatgaaattcaacggaggaaaaataaatgggaatgattggctattttgcagaaattgactcagaaaagattaaccaactgcttgagtctactaaaaaacctttgatggataatatacatgacacgctttcaggattacgccgactggatattgataaacgctgggattttttacactttgggctgacaggcacctctgcgttcgatccagcgaagaatgacccgctgagtcgcgccgtgcttggtgaacacagcctagaagatggcatagatggcttcctgggattgacctggaatcaggagttagccgcgacaatcgaccgactggaatcactggatcgaagtgagctgcgtaaacagttttccattaagcgactcaatgaaatggagatttatccgggagtaaccttttcagaagagttagaggggcaactctttgcttcgatcatgcttgatatggaaaagctgattagcgcgtatcgacgtatgctgcgacaagggaatcatgcgctgacggttattgttgggtgatggtgtcagggcaccaaaaaaaaccgccgaacatgtcggcggctttctgacttacaaactgactgtttacatcagcggcattgctaaccgcacaatgctaatcagcggttgtggccatacacccagcaccagtaccaacagtgcagagatcagcaccacgataccgcctgcgctgtactgccagtttgatggtgcatcgcgacccggttgttccggagcgtgcaggtataagctcaccgccacgcgcaggtagtagtaaaggccgattgccgaaccaacaaccacggcacccaccagccaccacaagtgtgcctggacaccgaccgccagcacgtagaacttaccgataaagcccagcgtcattgggataccagccagtgaaagcatcatcaccgtcatcactgccgcgaggatcggacgatgccagaacagaccgcggtaagagaacagggaatcagcatccgggccacgatacgggctggacatcaggctgaccacgccgaacgcgccgaggctgctgaacagataaccgaccaggtaaacccctaccgcttccatcgacatctcgccggtttgcagcgcaatcagcgccaccagcagatagccgaggtgagagatagatgagtaaccgagcagacgtttgatattggtctggctcagcgccatcaggttaccgaagatgatggaggcaaaggcgataatcgccagcactacgcgaatcgcttcactgtcacccaccggtgcgtaaaggaacaaacgcatcaccacgccgaagatagcgattttgctcgccgtcgccaggaaagtggaaaccggcgcaggcgcgccctggtatacgtctggcgtccacaggtggaacggcaccagagagagtttgaaaccgaggccaacaatcatcaggccaaaacctgccagcaacagcggctcgttgagcataccgtcgccgaggtttttacccagtgcgacaaacgacaggtcgccagactgcgcatacaccagcgccataccgaacagcaggaaagaagacgctgcggcagaaaggatggtgtatttgatactggcttccagcgaacgtttctggcggaaagcgtaaccgaccaggccaaacagcggcaaagagatcagttcgataccgaggaacagagacgccagatggttggcattcgccagcaggatcccgcccagcgcggcaattaacaccaacaggtagaactcgtccttgttgtcgttatagccttcaagccacgggtaggcgaaagtacaggtggcgaggctcgccaacaataccagcccggtgtaaagcatggcgaaaccatcaacgcgcatcagcggcgtaacgtccatagcgcccgcctggccgacaaaccagagcgaaaccagcgccgcgttaagcccaataaccgagagcgtagcgttgaggaaatgattgcgtcgccacgcaatggagagcatcacaaccaccaccgtcaagccgacgatcagcaacggtagcagtgcgatcaggttttgtggagttattgtcatggcgatttacggccttgtagtagtaacggaattaacaaaccactgctggatattgccaatcgcggagtgcgaggtatccagaatcggctgcggatagaagcccagcagtaccagcagcaccaccagcaacaggatcataaacagctcacgcagcgacatccctggcagttcctggctggcaatctggcttttcgctttgccgaagtaagcgcgatgcagcatcgccagcgaataaacagatgcaaagaccagcccaaaggtagagataacggtaatcaccgggacaacctggaagctgccgaacagaatcataaattcgccgacgaagttaccggtgccaggcatcccaagcgttgccaccgcaaagaacagcgacagtgctggcagccatttcattttgctccacagaccgcccatcatgcgcatgtcgcgggtatggatacgttcataaagctgaccacaaagaataaacagacccgccgccgacaagccgtgcgcaatcatctggattaccgcgccctggtaggccaactggctgccggtgtagatagcaatcagcacgaagcccatgtgggaaaccgaggtgtaggcgatcagacgtttgatatcggtctgggcgaaggccatccacgcaccatagaagatgccgataacacccagccacatggcgattggcgcaaactctgccgacgcgttcgggaacagcggcaaggagaaacgcaacagaccgtaagcggcggttttcagcaagatccccgcgaggtcaacggaaccggcggtcggtgcctgggagtgcgcatccggtaaccagccatgcagcggaaccaccggcattttcactgcgaaggcgatgaagaagcccagcatcaacaggtattccacgccgttagacatcggcgtattcagcagctcttcatagttgaaggtccagacgccggtcgcattgtagtgaacgaaaaccagcgccaggatggcgatcaacatcaccagaccactcgcctgggtgtaaatgaagaacttggttgccgccgtgatacgcgttttaccgtcagaggctttatgcccccacagtgcgatcaggaagtacatcggcaccagcatcatttcccagaagaagaagaacaggaacatgtcgatggcaaggaacacgccgataacgccgcccaggatccacatcaggttgaggtggaagaagccctgatatttttcgatctctttccacgaacagagtaccgccagcacaccgagcagaccggtcagcacgaccatcagcaacgacagaccgtcaatggcgagatgaatagagataccaaaacgcgggatccacggcatgtcgaattcagactgccactgcggaattccggcggattgcgtcagtgaataaccgccctgcaaccacagttgcagcgacagcgccagcgtcaatcccatggttaccagcgcgatccagcgcggcaccttgacgccaaagcgttcggtctgccagcacaggaagccgccgataaagggaattaatattagccagggtagtaacatggcgatctttattccttgtaaaagtcccgtcaggaccggattttcaacgaattctcacgacagaaaattctcttcggactgggggtagtgtcggatgcgccgcgaagacggcttatccgacctacgttcttatatgcccaggggcaatcccacaatccttaactcaacgcagtaccatcaacagtgccagcaccacgaccgcaccgatgctcatggatgccacataccagcgcagataaccgttctcgcttaacagcagacctttacctgcaaagcgggaaaggacagccgggatgttcatcattgagttcagcggatcgcgtttcagcaaccaggcaatacccaggaacggcttgacgaacactttgtcgtacagccagtcaaagccccaggcgttgtaccaccaggtacccagcagacggcccggcgcactgttggcgatggaggtcaccagagtacgtttacccagccatagccaggcagccagcagaatgccgaccaccgcgaccacgccagaggtaatttccagggtcaacatgctgccgtgcgccagctccgtcgtttgcggaagcacgccctgcagcggcggtacaatcagtgcgccaacgaaggtggaaaggatcagcagcacaatcagcggcaggctgtgagttacccctttcacggcgtgagcgtgaatttgttcttttccgtggaagacgatgaaaatcatacggaaggtgtaaagcgaggtcataaatgcaccgaccagacctgccaccatcagattgatatgtccattcgccatcgcacccgcgaggatctcatccttactgaagaagcccgcagtgaccagcggcagtgccgacagtgctgcgccgcccaccaggaagcagagataaaccagcggaatagatttacgcagaccacccatcttaaagatgttctgttcgtgatggcaggccagaatgacggaaccggatgccaggaacagcagcgctttaaagaacgcgtgggtcatcaagtggaaaatcgccgcatcccatgcctgcacgccaagcgcgaggaacatgtagccaatctggctcatggtagagtaagcgagaacacgtttgatgtcggtctgtaccagcgccgcaaaaccggccagcagcagcgtaaccgccccaacaatgcccaccagatgcagaacttccggcgtcatcaggaacaggccgtgggtacgggcgatcaggtagacacccgcggttaccattgttgcggcgtggatcagcgcggagacaggcgtcgggcccgccatcgcgtcggcaagccatgtctgcaacggcaactgagcagatttaccgaccgcaccgcccagcagcatcagcgtcgcccacatcagcatgttattgccgtcagcaaagtgcgctggtgccagttccaccatttcgcggaagttcagggtgcccagttcgttgtaaagaatgaacagcgcgaaagcgaggaagacgtcacccacacgggtcacgacgaacgctttcattgccgctgcgccattcttcggatcggtgtaatagaaaccgatcagcagataggagcacaggcccacgccttcccagccgaggtacatcagcagcaggttgtcggcaagcaccagaactaccatgctggcgatgaacaggttggtgtaagcgaagaagcgagagtagccctcttcaccgcgcatataccaggaggcgtacatgtgaataaggaaacccacaccagtgaccaccgagagcatggtcagcgacaggccgtccagcaccaggttaaaaccgatgttaaagtcgcctaccgacatccacgtccacagcggctggctgtatgcctgctcaccgttagcgaagaagtcaacgccgataaaggcagttaccagcgccgccaggcccacagagccaacgccgacgatcgccgagacgttttcagaccagcgcccacgggagaacgccagcaggacgaagccaatcaatggcaaaataatggttaaggcaagcatgttcatccgcgcatctcacttactgaatcgatgttcaggttctggcgacgacggtgaagttgcagcagcagcgcaaggccgatactcgcttccgccgccgcgaggctgatggcgagaatgtacatcacctgaccgtcggtctggccccagtagcttccggcgaccacaaaggccagcgcagaggcgttaatcatgatttccagaccaatcagcataaacagcagattgcgacggataaccagaccggttaagccaagaacgaataagattgccgcgaggatcagtccatgttgtaaggggatcatgcgtgctcctccgtttttcttttcgcgctgtcgtctttacgattgctcagcacttcacccgcacgctcttcacgaccgacgtggaaggccacaaccagacccgcgagcagcagcatagaagccagttccaccgccagtacgtaaggcccgaacagcgtaatacccactgctttagcactgattggcgtaccgtcgataccttgatcgttaacaccgagaatggcgtaaacaatcaccaccagcatgatggctgacaaaattgccggaccaatccacacctgcggtttcagccactggcgttcctgttcgatttccgaaccgcccaggttgagcatcatcaccacaaacacgaacagcaccataatggcacccgcgtagacgataatttccagcgcaccggcgaagtaagcgcccagcgagaagaacaccccggaaatcgccagcagcgaaataatcaggtacagcagtgcgtgtaccggattggtatgggtgatcactcgcaaggtcgcaagtatggctatcaggccacagatataaaaagcgaactccattgcccctctccttacggtaacaggctcttgacgtcgataggcttggcttcgttctctgcttcgcccttatctttgccgtcgattgccatacctgccatccggtagaagttatattccgggtatttgcccggaccggagatcagcagatcctctttctcgtaaaccagatcctggcgcttgtattcccccatttcgaaatccggggttaactgaatcgccgtggtcggacaggcttcttcgcacagaccacagaaaatgcagcgtgagaagttgatgcggaaaaattccggataccagcgaccgtctttggtttctgctttttgcagcgagatacagccgaccgggcaggctaccgcgcagaggttacaggctacgcaacgctcttcgccgtccggatcgcgggtcagaacgatacgaccacgataacggggcggcagatagaccggctcttccgggtacattcgcgtttcgcgtttggcgaacgcgtgcaggccgatcatccagatactacgaacctgggtgccgaaacctactaacaattcttttaaggtcatggtcttattgccccttattgcgcctgccagagaatgacagccgccgttaccagcaagttgatcagcgtcagcggcaggcagattttccagccgaaggacattacctggtcataacgcggacgcggtaacgacgcacgaatcaaaatgaacatcatcataaagaacgcggttttcagcgcgaaccagatgaatggcggtaacaacgggccttgccagccaccgaagaacagcgtcaccatcagtgcagagatggtcacaatcccgatgtattcgcccacgaagaacagaccgaacttcataccggaatattcaatgtggtaaccatccgccagttcctgctcggcttccggctggtcaaacgggtgacggtgacacaccgccacgcccgcgatggcaaaggtaataaaaccaaagaattgcgggatgacgttccacacatgcgcctggctgttgacgatgtcggtcatgttgaatgaaccggcctgcgccaccacgcccatcagggaaagcccgaggaacacttcgtagctcagggtctgcgcagaagcacgcatcgcacccagcagcgagtatttgttgttacttgaccagcccgcaaacagcaccgcgtaaaccgccagacctgccatcatcaggaagaacaaaatcccgatgttcaggtcggcaaccacccaacccggactgactggcacaattgcaaaggccagcagcagcgaggtaaaggcaatcatcggtgccagggtaaagatgacgcgatccgagaatttcgggatccagtcttctttaaagaacattttgatcatgtccgcaaccagctggagcgaaccgccccagccaacacggttaggtccataacggttctggaacagacccagcaggcgacgttcgccaaagctcatgaatgccccacaggtgactaccaccagcaggatcaccaccgctttaaggacggtcagcaagatctcaatcagttccggtgatatccaactcattgttgtgcctccttgagatcctcaagatgcgcgccagccagcaccggagcaatgccggacatacccatcggcaagcccacctgccctgccgtcagcccttcggagatttcaaccggcagcgtgaccatgttgccatcgtaactaaaggagacgcgtgtacctgcgttcacccccaacttcgcggcatccgctgggttgagtttgatgtacggctgcggcatacggctctggaagaccggagcacgctgtgacaattcatcgctgccaaacaggtggtagtacggcgcgatacgccatttcccgtcctgcggctggaagcgtgccggtacgctggtgaagtaatccagactgttttcgctggtttcaaacagacgcacgcccggatcgccaaaacgcagtttgccgcccacttcgtcctggaatttgttccacgcctgcggggagttccagcctggcgcccaggcaaacggcacttgcgaacggtgcgcggtcggctggttgttaccttccatcgagaaggtaaacatggtgtcaatatcctgcggctgacgcggctcatgaacgctgatattggcgcgcatggcggtacgaccactatagcgatgcggttcacgggccagtttctgcccacgaatacggaatgtcgcatccggcgcagcatctttgatacctgccagttccgggattttcgccacaacagcgtcaatcacgtggtcgagctgcgtccagtccacttcacggctcagcagggtgctatgcagcgagtgcagccagcgccagctttccagcatgacagtttggctgtcgtaataagccggatcgtaaacctggaagaaacgttgggcgcggccttcgttgttgatcaccgtaccgtcgctttcagcaaagctggcagcagaaagcaccagatgagcgttttccataatcgctgtgcgttgatggtcaaccaccatcaccagcggcgctttagccagcgcagcattcacgcgggtagcggaagcgtgacgatgcagatcgttttccagcaccaccaccgcgtcggcgcgtccggtttccagttcggttaacgcttcttcaagcgatccaccgcccataatgcccagccccatgctgttgacggaacgggcaatcatggtgataccgacgtcagcgccgcgacctttcagggctttcgccacgttagccgcagcctgaatcacttcagcgctaccagcgttcgtcccggagataatcaacggtttcttcgcaccagccagtgcctgcacgatgacgtcgattttgctttgcagctcaggttcaataccgtcaaccgctggtgcagagttatccagcgcatgagcgatggcaaaacctaaacgcgcctgatcttcaaccggtgcgcggtaagtccacgccgcgatatcatccagacgggtgtcatcaacgttggtaacaaacagcggatgcttcgcacgttgaccgatgttgaggattgccgcaatctgccagtcagccactttctgtgctgccgccatttcgcgcgctttaccttttaccgcctggcgcaccgccagcgcaacgcgcgcgccggtctgggtaacgtcttcgcccagcaccagtaccgcatcgtaagattcgatttcgcgcagtgccggcgtataaatgccgccttcacgcagtactttcagcgccagttgcagacgttcctgctcaccgtgagcgataccggtatagaagttttcttcgcccaccagctcacgcagcgcaaagttgctttccacgctggcacgcggagaaccaataccgatgactttcttcgactgacgcagaatatctgctgcgccctgcattgcctgttcggcgttgagggtaatgaaatcatcgccacgacgctgtactggctgacgcggacgatctttcaggttgacgtaaccgtaaccgaaacgaccacggtcgcagaggaagtagtggtttaccgtaccgttgtaacggttttcgatacgacgcagttcgccataacgctcgccggggctgatgttacagccgatggaacattgctggcagatgctcggcgcaaactgcatatcccatttacggttgtaacgctcggagtgcgttttgtcggtgaatacgccggtcgggcaaatttcgaccaggttaccggaaaattcgctttccagcgtgccgtcttccgggcgaccgaagtagacgttgtcgtgcgcaccgtaaacgcccaggtccgtaccgtcagcgtaatctttgtagtaacgcacacagcggtagcaggcgatgcagcggttcatttcgtgagagatgaatggccccaaatcctgattacggtgggtacgtttagtgaaacggtagcgacggaagctgtgtccggtcatcacggtcatatcctgaagatggcagttaccgccttcttcacatactggacagtcgtgcgggtggttggtcattaaccactcgaccacactttcacggaactgtttcgcttcttcgtcgtcaatggaaataaaggtgccatcggaagccggtgtcatacaggacatcaccaggcgaccacgcgtgtcttccgcgttttggtattgcttcaccgcacactggcggcaagcaccgacgcttcccagcgccggatgccagcaaaagtaaggaatatcaaggcccagagacagacaagcttccagcaggttgtctgctccgttgacctcgtattctttgccgtctacatgaattgtagccattagcatgcttccagttttctcagtcagagactgagcgttaatcgaaattcggttaccagcgctctttcagcaggttcggctgaatcccattaatcaaatgggtattgctgaacggctgtttgattcccgcctcaaattcttcgcggaaatatttgatggcgctctgtaacggctccactgcaccaggtgcgtgggcacagaaagttttacccgggcctaagaatcgacacagttgctcaagtgtttcgatatcgcccggctggccttcgccacgctccagcgcacgcagaattttcacgctccacggcagaccgtcgcggcatggcgtacaccagccgcaggactcacgggcgaaaaactcttccaggttacgcaccagcgacaccatgttgatctcgtggtcaaccgccatcgccagcgccgtacccagacggcttcccgctttaccgatactttcgaattccatcggcaggtcaaggtgcgcttcggtcaggaagtcagtccccgcgccgcctggctgccaggctttgaatttcagaccgtcacgcataccaccggcgtagtcttcgaggatctcgcgtgcggtggtgccgaacggcagttcccacagacccggatttttcacccgaccggagaagcccatcagcttggtgccagcatctttacttttcgagatgttctgataccactccacgccgttagcgaggatcgccggaacgttacacagggtttcgacgttgttaacgcaggttggtttaccccatgcaccggaggttgccgggaagggcggtttcgagcgtgggttagcgcgacgcccttccagggagttgattaacgctgtttcttcaccgcagatgtagcgccctgccccggtatggacgaacagttcgaaatcgaaacctgttcccataatgtttttgccaagcagacccgcttcggtggcttcggcaatggcacgacgcagattcactgccgcttcgatatattcgccgcgcaggaagatatagccacggtaagctttcagcgcaaacgcggagatgagcatgccttccaccagcaggtgcggcagttgctccatcagcagacggtctttataggtgcccggctccatttcatcggcgttacacagtaggtaacggatattcatggattcgtctttcggcatcaggctccacttcaggccagtcgagaagcctgcgccaccgcgccctttcagaccagagtcttttacctgattaacgatttcgtccggagacaacccggtcagcgccttacgcgcgccttcgtaaccgtttttgctgcgatattcgtccagccacactggctgtttgtcatcgcgcagacgccaggtcagcggatgcgtttcgggagtacggataatgtttttcatttataccgctccagcagttcagggatcgcttccggggtcagatgcgcgtgagtgtcctcatcgatcatcatgtttggccctttatcacagttccccaggcagcaagttggcagcagcgtgaagcgaccgtcaaatgtcgtttgccctggtttgatgttcagttttttctccagcgccgcctgaataccctggtaaccgttgatgtgacagaccacgctgtcgcaataacggatcacatggcggcctactggctgacggaagatctggctataaaacgttgccacgccttcgacgtcgctcgccggaatacccagcacatcggcgatcgcgtggatcgcgccatccggcacccagccacgctgcttctgaacgattttcagcgcttcaatggacgccgcacgcgggtcttcgtagtggtgcatctcgtgctcaatcgcttcacgctctgccgcactcagctcaaaagcctcggtttgtggttgttgattctcgtgcataattagcggtccacatctgacataacaaaatcgatactgcccagataaacaatcaggtcagacaccaggctgccgcggatcgccgccggaatttgctgcaaatgcgcataactcggcgtacggatacgggtgcgataactcatggtgctgccgtcgctggtcaggtagtaactgttgatccccttggtcgcctcaaccatctggaaggattcattggcaggcatcaccggaccccacgacacttgcaggaagtgggtgatcagggtttcgatatgttgcagcgtgcgctctttcggcggcggcgtggtcagcgggtgatccgctttgaacgggccttccggcatgttgttgaggcactgctcaagaatacgcagactctggcgcaactcttctactttcagcattacgcgggtgtagcagtcagaaacaccaccgcccaccggaatttcgaagtcgaagttttcatagccagaataaggacgcgccttacgcacgtcgaagtcgatcccggtggcacgcaggcccgcgccggtggtgccccactccagcgcctctttcgcgccgtaagcggcaacgccctgggaacgacctttcagaatggtgttttgcagcgccgctttctcgtaagacgccagacgtttcggcatccagtcgaggaactcacgcagcaggcgatcccagccgcgcggcaggtcgtgcgctacgccgccaatacggaaccacgccgggtgcatacgaaaaccagtgattgcttccaccagatcgtaaattttctgacgatcggtaaaggcgaagaacactggcgtcatcgcgccgacgtcctgaataaaggtggagatatacagcaggtgactgttgatgcggaacagttcggagagcattacgcgaatgacgttaacgcgatccggcacggtgatcccagccagtttctctaccgccagcacataaggcatttcgttaacgcagccgccgaggtattcgatacggtcggtatacggaatgtagctgtgccaggactggcgttcgcccattttctctgcgccacggtggtggtaaccgatgtctggtacgcagtcgacaatctcttcgccatcaagctgcaaaacgatacggaaagcaccgtgcgcagacgggtggttcggaccgaggttgaggaacatgaagtcctcattttcggtgccgcgcttcatcccccactcttccggtttgaaggtcagggcttccatctccagatcctgtttggctttggtcagctcaaacggcgagaattcggtagcgcgcgccgggtaatctttacgcagcgggtgacctttccaggtttgcggcatcatgatgcggcgcaggttcgggtgaccgtcgaatgtaatgccaaatagatcccaggtttcacgctcataccagttagcgttcgggaataatttggtaaaggtcggtacgtgcaggtcgttttctgccagcgccaccttcagcatgatgtcgcggttacgatcgatagaaatcagatggtagaaaacggaaaaatccgcggcaggtaacccttcgcggtgtgtgcgcagacgttcgtccatgccgtgtaagtcaaacagcatgacgtaaggtttcggcagtttctttaagaaatcgcccacttccagtaattgttcacgcttgatccacacaacgggaaccccggtgcgagtcgcctgaacagtaaaggcatccggcccaaaacggttgcgcagttcgccaatcaccggatcatcaagatgatcgcgggtctgccaggcgggttcttgcgcggttaagtcggtcatattgttcaccattgcaaatggtccgtggtgactgtcggcgcagtaagcttcgcgaaatagatttaggaataagcgaagaaaattccctttgccgacaggcgcaaattaaatctcgtcaggtgtacgcaggttggttacggcaatgcgttcaccgcgcttgcgttcgcgctctgattgcatattggcgcgataaacgccctgatcgccaaccacccaggagagcggacgacgttctttaccgatagattcctgcaacagcatcagtgcctgcatgtacgcttcaggacgcggcgggcagcccgggatatacacatcaaccgggatgaatttatcgacgccctgcacaacggaataaatatcgtacataccgccggagttggcacaggcacccattgagataacccatttgggttccagcatctggtcatacagacgctgaataaccggtgccattttggtaaagcaggttcctgcaaccaccatcaggtcagcctgacgcggcgaagcacgcaatacttcagcgccaaaacgcgccacgtcatgcaccgcggtaaacgaagtcaccatctcaacgtaacagcaggaaagaccgaagttatacggccaaattgagtttttacgaccccagttaaccatgtcattgagcttgcccataaacacgtttttgttaacttcttgctccagagggtcggttacgatctcctgcttttgcagggggtaacggtcgttctcaccgttgggatctatgcgggtgagcgtataatccatcttaatgcctcgcggttagcgttgacgattagcgatactgttcgtttccgggttcatacgctcgcggcgtgaacgcgcgggcgtccagtccagcgcgccaatacgcaccagataaaccagacctgccagtaacacaaaaataaaaattgcagcttccacaaagcctacccagccgctttcgcggatagaggttgaccatgcgaacagatacagcgcttcaacgtcgaagataacgaagaacatggccaccagataaaacttggcggacaggcgtaagcgggcggagccgaccgagtcgataccggattcaaacggaacgttttttgacctcgcgcgtgcgcgaccgcctaaaaaccaaccgcctaccagcatcaggcaacacaggccaatggcaacgataagaaagatagcgaatgcccagtgatgagcgatgacttcagtggatgttgacatactcattgcttactcatcaaaagtagcgcctgattctctgctctttacggcagatggacgccacatcgattcatggggaggaataaaaaaaaccttacaataactgcagaaactattttatacagctaattgatgtggtcttttactcctttctataaccttttgtcaactttaacaaaggtttcttcacactgatttacacaatgacaacaacatttgcatttggcgccctttctccccagatcattgacgactccaggaaaattagatgttgttgaatcgtgtccgttgtgaagcaatggaaaaaatacgggtctattttgacaggaatttgtgtcgattcctccccccaaaagagagtattttcttgatctgtgacacgcttttgtcattctataacaaaaatgcagcaacaaattcacgtattttttaacattattgtagcaggagatttttttcaggtgattatttgtgcgtacggggcgtgaatctctggtgattgaaaaatgaacagttttgtacgttctgcacgatacgaggaaagctttttactaaaaaaaagccgctggggtttaaaataaacccagcggttcgtttttacactattgtctcaggaattatctatcgtccgtcgattactcgatatccctttcaatcaacaatgagtcatctccttccggagcagacattgggctgtattgccacggattatggtagctctccatcgcctgatagatcacctgggccagctcattattactggacgggtcatagcacagcaaatattcggtatcaggtagcggcggtaagccatctactccactcagcacacgcagttccggactcatcatctcgaccggccttgccgtcacgccaagaccggctttcactgccgcacgaacggccggaagcgtcgaggcgacataagccagtcgccagggaatatctgctttattaagcgtcgccagcaccatatcgcgaaacggacttggatcatccagcaacacaagagggatcggctcacctttttgcaatacgtattccgctgcgcagtaccagtgtgttggcgaggtacgcaggttcaatgccttaaaggtagaaggacgatgggtggttaccatcaaatccacttcctgggattccagcatttctgccatgtaggcattacgtttaacgcggacatccagcgctagtttcggataaaccgaactcacgcgatttaacaggaaaggtaagatcgtatcggcagattcatctgaagcaccgatagttaacacgccctgaagattactgaacattaatgatgagcaggcctcatcattaaaacgcaggattttcctggcgtaaccaagaagttgaatgccatgttcagttaacagtttgttgcgaccgtgacgagcgaacagttctttcccaacgagttgttccagacgctgcatttgctgacttacggcggactgagtacgacacacagcggcagctgcggcagcaaaagtgttcagatcggcaacagcaacaaatgttctcagcagatcgaggtcgaggtcgaggttaattatcggacgatttgcacttatcatatattatcacttactggcggctcatactgagctggttaatgctgtgcacacacaaacaagcaattccatttgtaatgtgcctccctggcagtttcatccggaacccggacgaaagtaaaaatgcatatgagttgcactaaaaaagtgactcacattgttccgttataatgcctgaagtagatcacagaatatatcttcagggatcgcatatctattaagttactcactcttttctatttatgacatgcgcgtgtttgtataaatgtaaatgtgagtccttgttccactctcgtacagcatcgctggtcatacgcgaacacgtacaaacagcaatggtgaggcggcatcaagagcagggatccgtcatttatgcaagcattttaccccaaaaaccttttatttataagggtcattgcgaattatctgatgcaaagttatgttatgttaggcaaagtaatcttctattattaataagcacaacaaaacctttttgaatattaaataataattaattagcatcatccccattcattaattccgcttaacaatagtttcacgccttgcccccattgtgacacctcggaaatcatcacgctgttaaactctccgtaatgcggaaatatcatcatcgcgattcagtagtgaattcttaaacgaggcattttcacacaattatcttacagataaaaaaaccacacttacaattaagaatcagaacaattcactacataacattacttattaagcatatgcgcctcattattttgccattattaagttattaacagcacaatcgagccttcccctctggcaaaatcttattctgcagaccttcaaaacaccgtcctgggggagtacattgttctaagctgacttccacggcagggagtggcgataacagcaaaaaaggtcaagattcatgtcccccattgaaaaatccagcaaattagagaatgtctgttatgacatccgtggtccggtgctgaaagaagcaaaacgcctggaagaagaaggtaacaaggtactgaaactgaacatcggcaaccctgccccgttcggttttgacgcgccagatgaaattctcgttgacgtgatacgcaacctgcctaccgctcaagggtattgcgattccaaaggtctttactccgcgcgtaaagccatcatgcagcactaccaggctcgtggcatgcgtgatgttaccgtggaagatatttacatcggcaatggtgtatcggagcttatcgttcaggcaatgcaggcattgctgaacagcggggacgaaatgttggttcctgcacctgattacccactatggaccgcagcggtttcgctctccagcggtaaagcggtgcattatctttgcgatgaatcctctgactggttcccggacctcgatgatattcgcgctaaaattacgcctcgtacgcgtgggatcgttattatcaacccaaataacccaaccggcgcggtatattccaaagagcttttaatggagattgtggagattgcacgtcagcataatctcattatcttcgccgatgaaatttatgacaaaattctctacgacgacgctgagcatcactccattgcgccgctggcacctgacctgctgaccattacctttaacggactgtcgaaaacgtaccgcgttgcaggcttccgtcaggggtggatggtgttgaacgggccgaaaaaacacgccaaaggttacatcgaaggtctggaaatgctggcttcaatgcgcctgtgtgctaacgttcctgcgcaacacgccattcagaccgcactgggtggttatcagagcatcagtgaatttattacccctggcggtcgtctttatgagcagcgtaaccgcgcgtgggaattgatcaacgatattccgggcgtttcctgcgtgaaacctcgtggtgcgctgtatatgttcccgaaaatcgacgccaaacgctttaacattcacgacgatcagaaaatggtgctggatttcctgttgcaggaaaaagtcttgttggtgcaagggacggcattcaactggccgtggccggatcacttccgcattgtcacgctaccgcgtgtcgatgatatcgagctgtctttgagcaagttcgcgcgtttcctttctggttatcatcagctgtaatcttaatttcactgccggagattgcatccggcagtgttatcccgccacaatgacctgatgatgtcatcatacgtaaggtcactatgaaacagagccatttttttgcccatctctcccgcctgaaactcattaaccgctggccgctaatgcgcaacgtgcggacggaaaatgtgtccgaacacagtttgcaggtagcgatggtcgcccatgcgctggcagctatcaaaaatcgtaaatttggcggtaatgtcaacgccgaacgtatcgctttactggcgatgtaccacgatgcttcagaagtgctcaccggagatctccctactccggtgaaatacttcaattcgcaaatcgctcaggaatacaaggctattgaaaaaatcgctcagcaaaaactggtcgatatggttccggaagagctgcaggatatctttgcgccgttaattgacgagcatgcatatagcgatgaagaaaaatcgctggtgaaacaggcagatgcactgtgtgcatatctgaaatgcctggaagaacttgcggccggaaataatgaattcttgctggcaaaaacgcgactggaagcgacgcttgaagcgcgccgcagccaggagatggactacttcatggaagtatttgttcccagcttccatctttcgctcgatgagattagccaggattcaccgctgtaagcagtcggagtctgcgtcgcatcaggcaataagcaccggatgcgacatcaggctcttgtcaaaacggaaacagcatcgggatcatcaccacacaaaccgccatcacgataatggtgaacggtacccccaacttaacaaagtcactgaagctgtaattccccggacctaaaaccagtgtgttaacaggtgaagatatcggtgtcataaaggcggcggatgctgccatcgccacgaccatcgcaaatggataaggcgacacccccatcgttttggcagcagccagcgcaatcggagccatcaacaccgccgtcgcggtattagaaataaatagcccaataaccgccgacaagacaaacaaacaacccagcatcatatgtggcccgtaaccgccgccaatgtccatcagccctttcaccgccagcgcgacacctcccgttttctgtaatgccacagcaaatggcatcatcccaacgatcaaaataatgctcggccagtgaatggatttataggcgctttcagcatctatacagcggaatttccccatcagcaggcaggcgataatagcggcaacaggattaggaatttcatcggtcagcattaacgccaccattagcaccagacagaaaatcgcatggggtgcctggctgtgcgcgggcgatgcttcactcacctcttccggtaagttcagcgctacgaagtcgcggccctgtttggccagcataccgatcagtttccagttacccacaaccaggatgatatcgcccagcagcagaggctcatccgccagcgaaccttccagcgccacgccattgcgctttagccccactacattcaatccgtagcgggtacgaaaaccaatttcgcgcaccgatttaccaataagttctgactcaggaattaatgaaatctctgccatgcccacatcaagagcctggtcagaaaaatactcgccgcgcagtaccatcggctccagcaattgctcactacaaaattgccggagatcgacatcagccgcagacatatcaataagcaaaacgtcacgcgcgcgaaattcagaaaccccattaacgttcacgataacgcgacgaaaacgccgccagcgttcaacaccgatgacgttagcaccataacgttcacgtaatttgagatcgtccagtcgttgaccaatcattggcgatccggggcgaatagccagacgtcgcgcacgcccggtcagtcgatattcacggataagatcgcgaaaggttcggcgcgtccagccttcgcgctgcggggtctgggtatcccctttcagcatgaaacgcatcactaacatatacaaaatacccagcaccagcacgaccaggccaataggtgttacgctaaagaaactaaaaccatgatagccttcacgcagcaattcactgttgactaccaggttcggcggcgtcgccaccagcgtcatcatgccgcttatcagcccggcaaaacttaacggcatcatcaggcgcgacggcgacgtttgcatacgcatggcaacgcttaacaccacgggaataaagatagcgacaacgccggttgaactcataaacgcgccaagccccgcgacggtcagcatcaacaaaaccaacattttgatttcactgttgcccgccactttgaccagccatgtccccattacagtggcaacaccggtacggaccaaaccatcgccaataataaacaaggcggcaatcaggacaacgttaggatcggaaaagccggaaaatacttcggggaccgtcagcgttccgcttaatgcaaacgcgacaataacaaacaaagcgaccgcatccatacgcactctgcccgtcgcaaacaagacgatggcaacggccagtaatgaaagaacccaaatcaattcaccgttcacaacttatccttgttaattgagggggataacttgattctgccataaaaaagccccgacgagacggggctaaatcatgatcaggtgtttcactgaataataacatcgccatttggctgtttggtcacagtaatttgctccagactgtggaggactaaatcgacttcattcaggcgcggggtatctgccggggcattaaccgcaataacatggcaacccgccgccagacctgaaagcacgccagcgggagcatcttccaccacaacacactcctgcggcgcaaggcccagcagctgcgcgcctaacagatacgcatcaggttctggttttccgcgcttcacccgctcagcggttacaaacacctctggcgcgggaagccccgctattttatgacgcgctcgcgctaccggcatggagccagaagtcacaatagcccacggaatacctgctttattcaaatgattgagtaaggcgattgcccccggaagcgcggtaataccttcggtttccgtggcctcgatgtgctccagacgcgtaaactcggcggcaatgtctgcctcggatttgcccgccataaaatggcgcagagaggtgatcgcctgtttaccgtgaatgaaagccagcacctcttccggcgataacccatgacgtctggcccagttgctccacgcccgttctaccgcaggcagggaatccaccagcgttccatcaagatcaaacagaaaacctttgcaccgcacgcgggcctcctcaggcgttaataatttgattaatttcgttggcgctcaaatggtactggcgcgggcaggcatgccagacattaagcatgcgctgatatttttcccacattggcgtctgggcgttaaaaccgtgagttccagcgtcaaaatgggtatagcgcccttccacattaaccataaagcggacataaccgaggtaacgtgcttcagtggcagcgtcaaagccgaggaaggtgacacgacgttcatcgatggattgctggtcctgcaaattagaccaggaaacatgcaacgcatgatacatctccataatgtcgatgatagtgcggcaggtttcttctttcagctcgccaaactcgcgatccagttcacgcatctgtaatccataaccacgctcaatgattgtttgcaggcgacggtaacgttcagcatttgccggatcgagcatagtcatcatcttgtactggttagacaaaataagacgttgcgcgttggtcatttccattattgactcctgtatcactctactacggtgaaaaaaagaaggctgagtatgccttcttttatatgcgtaatcaggggtcaattacaaatcatcaaggaaagttttatccagttgtttgaaggcacgcttaagcgtgtcagctaatgcctggtaatcaggcttgccttcaacgggtgccaacacctgtccagactcctgcaatttaccgcgaacttcataaaaccagttgaggattgcaggaggtaatggcgttacagaacgcttgcccagccaccacaatccctgcatgggtaaacttaaggcgaacagcgcagtggcaactgccggcccaagctgaccgcccagggcaatctgccagcagagagtaaatacggcgatcggcggcataaaacggatcgcataacgcgtcatcttgataacgcgattttcgacaaagactggggcaaggcgtttttccagcggccacgtctttgagtaatgctgtccccggcaaaacaagctaaaaaaattaacagaacgattatccggcgttgacatgcttcacctcaacttcacatataaagattcaaaaatttgtgcaaattcacaactcagcgggacaacgttcaaaacattttgtcttccatacccactatcaggtatcctttagcagcctgaaggcctaagtagtacatattcattgagtcgtcaaattcatatacattatgccattggctgaaaattacgcaaaatggcatagactcaagatatttcttccatcatgcaaaaaaaatttgcagtgcatgatgttaatcataaatgtcggtgtcatcatgcgctacgctctatggctccctgacgtttttttagccacgtatcaattataggtacttccatgtcgagtaagttagtactggttctgaactgcggtagttcttcactgaaatttgccatcatcgatgcagtaaatggtgaagagtacctttctggtttagccgaatgtttccacctgcccgaagcacgtatcaaatggaaaatggacggcaataaacaggaagcggctttaggtgcaggcgccgctcacagcgaagcgctcaactttatcgttaatactattctggcacaaaaaccagaactgtctgcgcagctgactgctatcggtcaccgtatcgtacacggcggcgaaaagtataccagctccgtagtgatcgatgagtctgttattcagggtatcaaagatgcagcttcttttgcaccgctgcacaacccggctcacctgatcggtatcgaagaagctctgaaatctttcccacagctgaaagacaaaaacgttgctgtatttgacaccgcgttccaccagactatgccggaagagtcttacctctacgccctgccgtacaacctgtacaaagagcacggcatccgtcgttacggcgcgcacggcaccagccacttctatgtaacccaggaagcggcaaaaatgctgaacaaaccggtagaagaactgaacatcatcacctgccacctgggcaacggtggttccgtttctgctatccgcaacggtaaatgcgttgacacctctatgggcctgaccccgctggaaggtctggtcatgggtacccgttctggtgatatcgatccggcgatcatcttccacctgcacgacaccctgggcatgagcgttgacgcaatcaacaaactgctaaccaaagagtctggcctgctgggtctgaccgaagtgaccagcgactgccgctatgttgaagacaactacgcgacgaaagaagacgcgaagcgcgcaatggacgtttactgccaccgcctggccaaatacatcggtgcctacactgcgctgatggatggtcgtctggacgctgttgtattcaccggtggtatcggtgaaaatgccgcgatggttcgtgaactgtctctgggcaaactgggcgtgctgggctttgaagttgatcatgaacgcaacctggctgcacgtttcggcaaatctggtttcatcaacaaagaaggtacccgtcctgcggtggttatcccaaccaacgaagaactggttatcgcgcaagacgcgagccgcctgactgcctgatttcacaccgccagctcagctggcggtgctgttttgtaacccgccaaatcggcggtaacgaaagaggataaaccgtgtcccgtattattatgctgatccctaccggaaccagcgtcggtctgaccagcgtcagccttggcgtgatccgtgcaatggaacgcaaaggcgttcgtctgagcgttttcaaacctatcgctcagccgcgtaccggtggcgatgcgcccgatcagactacgactatcgtgcgtgcgaactcttccaccacgacggccgctgaaccgctgaaaatgagctacgttgaaggtctgctttccagcaatcagaaagatgtgctgatggaagagatcatcgcgaactaccacgctaacaccaaagacgctgaagtcgttctggtggaaggtctggtcccgacacgtaagcaccagtttgcccagtctctgaactacgaaatcgccaaaacgctgaacgcagaaatcgtcttcgttatgtctcagggcactgatactccggaacagttgaaagagcgtatcgaactgactcgcaacagcttcggcggtgcaaaaaacaccaatattaccggcgttatcgttaacaaactgaacgctccggttgatgagcagggtcgtacccgtccggatctgtccgagatttttgacgactccaccaaagcaaaagtgaacaacgttgatccggcgaagctgcaagaatccagcccgctgccggttctcggcgctgtgccgtggagctttgacctgatcgcgactcgtgcgatcgatatggctcgccacctgaatgcgaccatcatcaacgaaggcgacatcaatactcgccgcgttaaatccgtcactttctgcgcacgcagcattccgcacatgctggagcacttccgtgccggttctctgctggtgacttccgcagaccgccctgacgtgctggttgccgcttgcctggctgccatgaacggcgtagaaatcggtgccctgctgctgactggcggctacgaaatggacgcgcgcatttctaaactgtgcgaacgtgctttcgctactggcctgccggtatttatggtgaacaccaacacctggcagacttctcttagcctgcagagcttcaacctggaagttccggttgacgatcatgagcgtatcgaaaaagttcaggaatacgtggctaactacatcaacgctgactggatcgattctctgactgccacttctgagcgcagccgtcgtctgtctccgccagcgttccgttatcagctgactgaacttgcgcgcaaagcgggcaaacgtatcgttctgccggaaggtgacgaaccgcgtaccgttaaagcagccgctatctgtgctgaacgtggtatcgcaacttgcgtactgctgggtaatccggcagagatcaaccgtgttgcagcctctcagggtgtagaactgggtgcaggcattgaaatcgttgatccagaagtggttcgcgaaaactatgttggtcgtctggtcgaactgcgtaagaacaaaggcatgaccgaaaccgttgcccgcgaacagctggaagacaacgtggttctcggtacgctgatgctggaacaagatgaagttgatggtctggtttccggtgctgttcacaccaccgcaaacaccatccgtccgccgctgcagctgatcaaaactgcaccgggcagctccctggtatcttccgtgttcttcatgctgttgccggaacaggtttacgtttacggtgactgtgcgatcaacccggatccgaccgcagaacagctggcagaaatcgcgattcagtccgctgattccgctgcggccttcggtatcgaaccgcgcgttgctatgctctcctactccaccggtacttctggtgctggtagcgacgtagaaaaagttcgcgaagcaactcgtctggcgcaggaaaaacgtcctgatctgatgatcgacggtccgctgcagtacgacgctgcggtaatggctgacgttgcgaaatccaaagcaccgaactctccggttgcaggtcgcgctaccgtgttcatcttcccggatctgaacaccggtaacaccacctacaaagcggtacagcgttctgctgacctgatctctatcggaccgatgctgcagggtatgcgcaagccggttaacgacctgtcccgtggcgcactggttgatgatatcgtctacaccatcgcgctgactgcgattcagtctgcacagcagcagtaatctcgtcatcatccgcagctttgcgctgcggatatctgaaccggaaatagtcactatttccggttttttattctcttaatttgcattaatcctttctgattatcttgcttaactgcgctgcatcaatgaattgcgccatctcactttgcatacttaccactttgttttgtgcaagggaatatttgcgctatgtccgcaatcactgaatctaaaccaacaagaagatgggcaatgcccgatacgttggtgattatcttttttgttgccattttaaccagccttgccacctgggtagttccggtgggcatgtttgacagtcaggaagtgcagtatcaggttgatggtcaaacaaaaacacgcaaagtcgtagatccacactcatttcgcattctgactaatgaagcaggcgaacctgagtatcaccgcgtacagctgttcacgacgggcgatgaacgcccgggtctgatgaacttcccgtttgaagggttaacctcaggatcgaaatacgggacagccgttggcatcatcatgtttatgctggtgattggcggcgcgtttggcattgtgatgcgtacaggaaccattgataacggtatcctggcgcttattcgccatacccgcggaaatgaaattctctttattcctgcgctgtttattctgttttcacttggcggcgcaatatttggtatgggagaagaggccgtcgcctttgccattatcatcgcaccgctaatggtccggctgggctatgacagtattaccaccgtccttgtgacctatattgccacgcaaatcggttttgccagttcgtggatgaacccgttttgtgtggttgttgctcagggtattgccggcgttccggtgctttctggctccgggttgcgcatcgtggtgtgggttatcgccactctgattggcctgatctttaccatggtgtacgcctcacgagtgaaaaagaatcctcttctgtcacgcgtgcatgagtccgaccgcttctttcgtgaaaagcaggcggatgttgaacaacgtccgtttacctttggtgactggctggtattgattgtcctgaccgccgtaatggtctgggttatttggggcgtgatcgttaatgcctggtttattcctgaaattgccagccagttcttcaccatgggtctggtgattggcatcatcggcgttgttttccgccttaacggcatgacggttaataccatggcttcatccttcaccgaaggggcgcgaatgatgatcgcccctgccctgctggtaggtttcgccaaagggattttgctgctggtcggtaatggtgaagcgggtgatgccagcgtgttaaataccatcctcaacagcattgccaatgccattagcggtctggataacgcggtcgcggcctggtttatgttgctcttccaggcggtatttaatttcttcgtgacgtccggttctggtcaggcggcgttaaccatgccgttactggcaccgcttggcgatctggtcggtgttaaccgtcaggttaccgtgctggcgttccagtttggtgatggcttcagccacatcatttacccaacctcagcttcgttaatggcgacgctcggtgtttgccgggtggacttccgtaactggctgaaggtgggtgcgaccctgcttggactgctgtttattatgtccagcgtcgtggtgatcggcgctcagttgatgggctaccactaaaaatgttaagagccgcaattgcggctcttttttcattctgccgtttcagtctctacggcttcatttttggcattgcgcttcatccacaacgccagcgctttcagcgagtctggagtgaactcatcgcagcgtgcggtgatttcttccggcgtcagccagcaaacttcactgacttcatcttcctgtagagcgaagggaccgtgagagacgcagctgaacaacgcgccccagacacggcaatttttatcttcgaaatagaactgcccgtgctcagcaaaggggaccccggcaatgcccaactcttcttccgcttcgcgacgcgcggattccagcagttgctcatcggcctggactacaccgcctgcggtcgcatctaacatgccgggtaaaaagtcttttgtctcggtacgacgctggaccagaattttgcccatgccatcatgcacgacgatataagttgcacgatgacgcagacactgtgcccgcatttgttcccggctggcttgtgcaatgacttcgttctcttcattgacaatatccacccattcagtacttgccaaacgacgctgttccattatcaggaaaccttctttttctggcgctcttacggcgcattttgagttgtgggtaaattacggattaatcgcgacctgcgcaatgatactttgatcattgagtgcgattacactaagtacgtcattatccagcatgccataactcgccggattaccgcctttcggaatactcaccgagccggggttgaagtggaaaatctccccccgctgttctgccactggcagatgggtatgaccgtacaccagcacatcgttctggtttaaagcaggtagattttccgggccaaaaagatgaccatgcgtcaaaaacagacgttgtttttccagtaatacctgttgccacggcgcggttatcgggaaatgcagcagcatttgatccacttcgctgtcgcagttgccgcgcacagcgataaccttatgtgccacttcattaagccgttcagcgactttggctggcgcgtaaccctccggtaaagcattacgcgggccatgattcaacacgtcgccaaggatcaccagccactgggcaccgctttgggcaaacaactccagaacacgttccgtcgccggtaacgacccatgaatgtccgatgcaaacatcagtttcatcactcactcctcgtcgaaaaaacgtaagctatgatactggattctgtcgttgctatcagccagattgcttcgccgaaagtgcaataaaacgctggacagacgctcgctgccactggaatgtcgcataatccaccaggcgttccggcacctcatcgccatgtagtaccaggcggttaatcattagcgccagatcagtatcagcaatgcaccattcaccaaataaattcggctgacccagtgctaacaaatgttctgccatcgcgaacaatttctctgcactggcttttccctcggccgttagtggcgcttttttcgcccccgcaaagacaacatccgtcgggcgttcttcgcggatgggcatcagatcgctgcgcaaccaagcctgaatctgtcgtgcacgcgcacgattttctaaatcaagcggataaatacgttcccaggtcggtggcgcaaatcgatcttccagatactccgcaatggcagaagattcactcaactcaaaatcatcgatctgtaataacggcacacggcgtgtctgaccgtaaccttgccacgccggctgcaaatgttcaccgctgtcgaggtcgatggtcttgatatgaaacgacaggcctttctcctgcaacgccacccaggcggataacacataaggggagaaaaaatgggcatctgaccaaagcgtgatagcgggtttactcattatgtcctcggcaataaagggggcttgctatcaaactatagagcctttttgtcactgtcacgtgacgaatactcacgcaagtcgccgcgctttctatacttgtggtgttcagatgattagacaaccggagctgcaatgatcgatctctatttcgccccgacacccaatggtcacaaaattacgctgtttctcgaagaagcagggctggattatcgcttaataaaggtagacctggggaaaggaggtcagtttcgcccggaatttttgcgcatttcgcctaacaacaaaattccggcaattgttgatcattctccagccgatggcggcgaaccgctaagcctctttgagtctggtgccattttgttgtatctggctgagaaaacgggactcttcttgagtcatgaaacgcgtgaacgcgccgtcacattacagtggttattctggcaggtaggcggactggggccgatgcttgggcaaaatcatcattttaatcacgcaaccccccaaaccattccttacgctattgaacgttatcaggttgaaactcagcgtctgtaccatgtactgaacaagcggctggaaaattcgccctggctgggaggcgagaactacagcattgcggatattgcctgctggccgtgggttaatgcctggactcgccagcgaattgacctcgcaatgtatccggcagtcaagaactggcatgagcggatccgttcgcgccctgccaccgggcaggcactgctaaaagcacaacacggtgatgagcgttcggatagttaacagaaacaggttctcgtgtattatttcatcctaagtaaaacaacggagaacctgcaatggcacaacctgccgctattattcgtataaagaaccttcgtttgcgtacgtttatcggaattaaggaagaagaaattaacaaccgtcaggatattgttatcaatgtgactatccactaccccgccgataaagcgcgcactagcgaagatatcaacgatgcgctgaattatcgcaccgtaacgaaaaacattattcagcatgtagagaataaccgtttctctttgctggaaaaattaactcaggatgtgctcgatatcgcacgtgaacatcactgggtgacgtatgctgaagtggagatcgataaactgcacgcgctgcgctacgccgattcggtatccatgaccttaagctggcagcgttaaccgccatatcgggaggctgcatgaacatagtgatcaccggagggacgggattaattggtcgccatttgattccacgtttgctggagctgggccatcaaatcacggtaatgacgcgtaacccgcagaaagccagttctgttctcggccctcgggtgacactatggcaagggcttgccgatcaaagtaacctcaacggcgttgatgcggtaatcaacctggccggagagccgattgctgataaacgctggactcacgagcaaaaagagcgtctctgccaaagccgctggaatatcacgcaaaaactggtcgatttgattaatgccagcgacacgccgccgtcggtactcatttccggctcggcaacgggctattatggcgacttaggtgaagtggtggttaccgaagaggaaccgccgcataacgaatttacccataaactctgcgcccgctgggaagaaattgcctgccgggcacaaagtgacaaaacgcgagtgtgcctgctgcgtaccggcgtagtgctggcaccggatggcggtattctcggtaaaatgctgccgccatttcgttttggcctgggcgggccgattggctctggtcggcagtatctggcctggattcatattgatgatatggtcaacggtattctctggctgctggataaagagctgcgcgggccatttaatatggtttcgccctacccggtgcgcaatgaacaatttgcccatgcactgggtcatgcgctgcatcgcccggccattttgcgcgtccctgcgaccgccattcggttgttaatgggcgaatcttcagttctggtattaggcggtcaacgcacgctgccaaaaaagctggaagaagcgggttttgcgtttcgctggtacgatttagaagaggcgctggcggatgtcgttcgctgatgtggtttactgcaaacatccaccagcggaaacgctgatgaataaatatagataattcagaactatttttagcggactgcaacttttacatttcagcggaagcggactcgcaaattccccatgaaatactccggcagcgttaaccaccggagaggaaattatttcagcgaacctttaaggaactgttgcagacgagggctttgcgggttaccgaataactgctccggcgccccttcttcttctattttcccctgatggaggaaaatgacgtgagtagaaacatgacgagcaaagcccatttcgtgagtcactaccaccatggttttcccctcttctgccagttgctgcataatacgcaacacttcgcctaccagttcaggatcgagcgctgaagtaggttcatcaaacagtaaaacttccggttccatcgctagcgcccgcgcgatagaaacacgctgttgctgaccaccggacaggtgtaccgggtatttcccctgcgcacgttcgtctatcccgacttttgccagatatttcaccgcccgctcgcgcgcttcctgcttgctcaggcccaacacctgaatcggcgcttccatgacgttttccagcaccgtcatatggctccagagattgaagtgctggaataccatcgtcaggcgtgtgcgcaataagcgcagctgatttttatcggcgactttgagttgaccgtctttatcgcgcaccagattgatcgtctggccattgaccacgatcgatccttcgctcggtttttcgaggaagttaatgcagcgcagaaaggtacttttacccgatcccgacgatccgatgatgcttatgacatctccggcattcgcttgcaatgagacccctttcagcacttcgtgttcgccgtagcgtttgtgcaaatcgataacgtttaatttattctcggacatcgtattctcagtgcgttgaagaaggtttcacatgctgcaaccagcgtttttcagctctacgaaagaggctgatcaggacataagagatgattaaatagagcaccgcggcaatgccgaaagcggtaaaaggttgatatgtggcggcgttaatatcgcgggcaattttcagcagatccggcaccgtggcagtaaatgccagcgcagtagagtgcagcatcaggatcacttcgttgctgtacgccggtaacgcaatacgcagcgcagaaggcaaaataatgcagcgatacattttaaaggtcgagaagccataggctctggcggcttcaatttccccatgcggcactgaacggattgccccggcaaaaatctcggtagtgtaagcgcaggtgttaagcgtcagcgccagcacggtacagttcagaccactgcgaaaaaaggcgttaaggaactcggttcccttaacaatctccagcgtgtacatgccggaatagaacaccagcaactgaacatacagcggcgtaccgcgaaaaatataggtaaataaccagattggaaactggatgtatttattacttgagacgcgaccaatcgccagaaacagcgccagaactccgcctatcactaccgacaaaatcagcagccacagggtgatcgccacgccagtaaagcgataaccgtcagtccacagcagtggtttccagtattcatgtaagatttcgatcacaggtcagccctcttcacacccacggagtagcggcgctcaaggaacagcagcacaccattggaaacggtggtgaaaacaagataaatcacgccacagacgatagcgaaatagaacggttcccaggtacttttgcctgccagttgcgtggctttgaccacatcttccaggccgagtaacgaaaccagtgcggtagatttgaggatcacctgccagttgttgccaatgcctggcagggcgtaacgcatcatcgccggaaacatgatccgccgaaacacttgcccacgagtaaaaccgaacgccgtcgccgcctctatatgtcctttcggcactgccataaacgcgccacgaaacgtttcggtaaaataagcaccgtagataaaaccgagagtgataatacctgcgaccatcggatcaatatcaatctgcccgacgcccatcgcctccgtcaccgtgtttagcgcaatctgcaaaccgtagaaaatcagcagcatcaatactaaatccggcacgcctcgaatcagcgtggtgtacccttcgaaaataaggcccgaaagccgattttgtgagagcttaccgccagcgccaattaaaccgatgattacagcgagcactacagagctgatagccagctccagcgtgacgagcgcaccctgtaaaataacacctgaaaacccatacaacatgctgcctgtcctgtcgtgtgtggtgaattaccgcctcttgtctccctccggatacccgaagggagcgggctttctttcaccgatggcgattaaccaccataaacatcaaaatcgaagtactttttcgctaatttctcgtaagtaccgtcagcgcgcatttcggcaaaggctttgttcagtgcctcgcgcagttcgttatcttctttacgcaggcccatgccggtccctacgccaaacagtttttcatctttaacagacgggccaccgaatttgtaatctttaccgacgggttgtttgaggaaaccttcgctggctgcgacctcatcctggaacgcggcatcaatacgtccggcagtcaggtcagaataaatattgtcctgcccctgataagaaacgatttcaatgccttttggtgcccagtgttcgttaccgaacgtctcctgggtggtgccctgcaatacgcctacccgtttgcctttcagcgattcgactgtcggctgaatgtcggaatttttcgccaccaccagacgagaatcggcagcgtacagtttgtcggtgaaggctatttcttgctgacgtttttccgtaatggaaagcgatgacatgatggcgtcaatcttcttcgcttttaaggacgggattaacgcatccagtgggttttcgacaaacgtacattgcgtattgatgcgtttgcacaactccttcgccagatcgatatcgaagccaaccagttcaccttgtgaattttttgattcaaatggcgcataggtcggatcggtaccgatgcggatgttttgcggaatcgcagcaaatgccgcagttgcgctggagaaggccagaaccagagagagcgatagcaccagttttttcataatgtcctcaactgacagtctttttatcgggaatatttacaggtttgttacacttatcgtgccataaaattgaccatcaaggcaaaatatcccgccccgctagacgtattatttttcattaaaaatgcttaagtatgcatttcaatgcaccacgatagtgcaacaaacctggcgtgcaccatgatgatcattccatcaggtacagcttccctgcgacgtatcagtcaccgtagacattaaagtcgaaatactttttcgccatcttgtcgtaggtaccgtcctgacgcagctcgccaagcgccttattaaacgcagccgtcagttcagcatcatctttacgcagccctacaccggtgccgtcaccgaagtattttttgtctttcactgatgggcctgcaaaggcgaaatctttaccggcgggttgcttaaggaaaccttcgctggcagcaacttcatcttgtaacgcagcatccagacgtcctgcagccagatcggaatagactaaatcctggttggcataggccaccacatccacgcctttgctacgccaggtctcgttagcgtatgcttcctgggttgatccctgcagcacaccaacatgtttacctttcagtgaatccagcgttggctgaatcggtgaacctttggcggcaatcaaacgagaatctgcggcgtacaacttgtcggagaaagcaatctcctgctgacgtttatcggtaatggagagcgacgaaataatggcgtcgatttttttcgctttcagtgaggggatcagcgcgtcaaagtcgctggcaacctaggtacatttcacctgcatccgtttgcacatctcgttaccgagatcgatatcaaagccaacaaaatcacctttagcatctttcgacgagaacggcgcataggtggtatcggttccgatacgtaccgtctccggtagcgccgcatagctggaagccgctgcggagagaccgactaacaaagacagagcgagaatcgacttcttcatacataaccctcaagtgaaaatggcttttttatgttgtgtattgtgttgtgtgtttgcaggctctttcatgcaggtcttatgccatcttgacgacagcagtaacattcaacgttaaatatgttaataagacgttgcattattgtcctaaagttgaagatagcaggtatagcggttgaatcgcagcgtttcgattgaatggcagaaacaaaatgtcgaggatttgatcgcggttgcaaaattgccctgaaacagggcaacagcggagttatgcgccctgccagcgggcaaagagatcttcaggaagggttaccgcaaactggtcaagaacacgattaaccgtctgatttatcgcatcatcaagggattgtgggcgatgataaaacgccggaacgggaggcataatcaccgcaccgatttctgccgcctgagtcattaaacgcagatggcctaagtgcagtggcgtttcacgcacgcagagcaccaacgggcgacgttctttcagcaccacatctgccgcacgggtcagtaagccatcagtatagctatggacaatgccggacagggttttgattgaacagggtaaaatcaccatccccaacgtctggaaagaaccggaagaaatgctggcagcaatatcgcgcgcatcgtgtgtcacatcagctaacgcctgcacttcgcgcagggaaaaatccgtttcgagggataaggtctggcgcgccgcctggctcattaccagatgcgtttcgatatctgtgacatcgcgcagaacctgtaataaacgcacgccataaatcgcgccgctggcaccgctgatgcctacaatgagtcgtttcataaatagttgccctgtcagacttgcaggcagactttgcaggatttcggcgggagttgcaagtcagggtgccagaccggcaccctgagtgaaggcatcatccttcgttatgcatttcgagattttccacttcgttctgacgttgcactgctttggcgtcgtcattacgtaaagtatcaaggaaatcgaggtagccctgatcaacgtctttggtgacgtagacgccgttgaacaccgagcattcaaactgctggatatccgggttttcagcgcgaacggcttcgatcagatcgttcagatcctggaaaatcaacccgtcagcaccgatgatctggcgaatttcatctacttcgcgaccgtgagcgatcagttccgtggcgctcggcatatcgataccgtaaacgttcgggaagcgaatttccggtgccgcagaagcgaggtacactttcttcgctccggcttcgcgtgccatctcgataatctgctcagaagtggtgccacggacgatagagtcgtcgaccagcaggacgtttttatcgcggaactcggcgcggttggcgttcagtttacggcgcacggacttacgacgcagctgctgacccggcatgatgaaggtgcggccaacataacggtttttaacgaagccctggcggtacggtttgcccagaatacgcgcaatttccagcgcgatatcacacgaggtttccggaatagggatcaccacgtcgatatccagatcttcccattcgcgggcaattttttcgcccagtttggtgcccatattcacgcgcgcgctgtaaacggaaattttgtcgatgaacgagtccgggcgggcaaagtatacatactcaaacaggcacggattgctgaccggattgtcagcacattgacgggtaaacaactgtccttcttcagtgatgtaaatcgcttcgcccggcgcgacgtcacgcaggaaatcaaagcccagcgtatcgagcgcaacgctttcggaagcgaccatatattctgtgcggttctcgtcaatatcacgttttcccagtaccagcggacgaatcccgttaggatcgcggaaagcaaccataccgtggccgatgatcatcgccacacaggcatacgcgccgcggattaagcggtttgtagcagcgatggcggcgaaaatgttgtcggcttccagcgggtaatggcggaagttgtccagttcgcttgcgaaaatattgagcagaatttccgagtcggaagtggtgttgatgtggcggcgtttttcttcaaacagttttttacgcaactcgtgagcgttggtcagattgccgttgtgggcaagcgtaatgccatacggagagttaacgtaaaacggctgcgcttcagaggcgctggagctgccagccgtggggtaacgcacatgaccaatgcccatattgccctgcaaacgctgcatatggcgagcttcaaatacatcgctcaccagcccgttcgctttacgcaaacggaagcagttattggcatctatggtgatgatgccggcggcatcctgaccgcgatgctgaagcaccgttaaggcatcataaatcgactggttaaccggcataacaccggcgataccgacaataccgcacatacgtctttttcctcgttaagccacatctcagagcacttacgctctgggcaagaaacttgacgagctttgcagataatcaaaaaaccatctgatgataaaactgaactgcgggatcagctgtgatttgctccagtcttcgcttttcgacaccccggtaaaggagtcgagaaagaagagaatggcggcaacaatcaacacaccgcgcaacgcaccgaaacagacgcccagcacccgatcggtgcctgacaaccccgttttctctaccaactggcctatcacgaagttcacgatagcaccaacgatcagggtagcgataaacagtaccgcgatggcaatcccatttcgaaccagttcgtcttcaaagcccgtaaaccagactgacaggtaagtgtagtaatgactggcaacaaagaaagcacaaccccatgtcaccagcgataacgcttcacgaacaaagccgcggatcaggctaaccagagaggaaaaagcaatcaccgcgattatggcgtaatcaatccagaccatatgtgtcccacgattttacgccctgtcatcctgttcggggcgcattctaacagaaaaagaaaacgtttgcgtagggatttccttcccgcgcatcaataaaaatggcgctgaaaaaatattcaacgccatcgactttttatgcctttgcggcatcgggcaatgcgtgtcggatgccgcatgaacgccttatccgacctacagttctgctccagcacaggcctgataagacgcgctggcgtcacatcaggcaacggctgtcggatgcagcgtgaacgccttatccgacctacggttctactcctgcgtaggcctgataagacgcgctagcgtcgcatcaggcaacggctgtcggatgcagcgtgaacgccttatccgacctactgttctacccctgcgtaggcctgataagacgcgctggcgtcgcatcaggcaacggctgtcggatgcggcgtgaacgccttatccgacctacggctctacccctgcacaggcctgataagatgcgccagcgtcgcatcaggcaagaccgtattaattcggtgtatagcccattaccacgccacttaagccagaaagctgcttgagctcacccagcgatcctttcagcttctctttggaagcatccggcccaaccagaatacgggtaattttaccctgcactggcgtggatggcgacgtataaacccgataaccggcaccgcgcaacttaccgacaatctcattcactttatcggcatttttcagcgcgcccagttgcacaacataagctttacccgttggcgctgctttttcttccacaaccggcttcggttctggcttcggcgcaggtggtgcttcaacctttggcttaagcggctccaccggtttcggcttcggtggggcgaccggtgcaggttccggttcaaactcggtgttattggctgcaatagtggccggatcgagcgacggtgctgcggcatcacctgcccgtacctcttccgctgcgccttccggcggctgcgtcggcaacgcctgggtggcggctggcatcatatcaggctcatcgcgatcgcccgctttcggcaccagcgggatagcagcgaactcatcctgataatgctttttctgcccgtccagcagccctggaagtacaatcacccccagcgccaccagcacgatcgtacccactaaccgattctgaaacttacttgccaccgcttctcctcgcgtcaatcacttccatgacatgtgcgaccgtgtggaacgaaccacacaccagcacggtgtcttccgctttagcgtccgccattgcggcatcccatgcctgcgcaacgctatcaaatgatttgccgttacccaaatgctcaagcagttgttctgccgtggcaccgcgcggcccttccagtggcgcacaataccagtcatcaaccacgcttttcaaccaggccagagttccggcaatatctttatcatgtagcataccgataaccgccagcacgcgcccgtttttcggtagcgctttcatacgcccggtgagatattccgccgcatgtggattatgcgcgacatcaaaaataacgcgtggcgactcgctcacaatctggaaacgtcccggcaaaattgcgctggcaatcccgtcgcgaatggcattttcactgacctccagcccgctggcacgcagtgccgccagcgccgttgcggcattcggttgcgggacaagcggcaacggcagattttccagcgtgccgtgagcatcgctaaacgtccagtcatgatcggtgacggaatagttccactcaacgccccgacgttgtagcagtgcacctttttcctgcgccacatcagcaatggtagaaggcatttccggctcaccgacaattgccggtttttcgctgcgaaagatacctgctttctcgcgaccaatactttcgcgatctggccccagccagtcggtatgatccagcgcaatactggttactaccgcgacatcggcatcgacaatattggttgcgtccagacgaccgcccagccctacttccagaatcactacgtcaagttgtgcctgcttgaacagccacaacgccgagagcgtaccgtactcgaaataggtcagggaaatatcaccgcgtgccgattcaatctccgcaaaagaagcggtgtgggccgattccggcaattcctgaccctgcacacgtacgcgctcggtataacgcaccagatgcggcgaactgtagacgcccactttgtaccctgccgccatcagaatcgactccagcgtacggcaggtggtgcccttgccattcgtacccgcaacggtaaacacaaatggcgctggtttcagaatgccaagacgcgccgcgacctggctcacgcgctcaaggccgagatcgatagttttactgtgcaggttttccagataagaaagccacgaagccagaggcgacgcggcttgaggagtgcgtttgataatcatggtatccgctgattcgttacggtgagaatagcaaaagggcagagccagtggccctgcccttatcagttatcaggcctcaggttcctgatccggtaccggtggcaccactacgccttcacgcggcgcttcaggattcggcgctggcagattcatcaacttcgccagaatgctcgccagtttcaggcgcatttccggacgacggacgatcatgtcgatcgcgcccttctcgatcaggaattcactgcgctggaatcctggcggcagtttttcgcgaacggtctgttcgataactcgcggaccggcaaagccaattaacgctttcggttcagcgatgttgagatcgcccagcatggcgaaacttgcagaaacaccgcccatggtcgggtcggtcagcacggagatgtacggcaagccgcgctcctgcatttttgccagtgccgcagaggttttcgccatctgcatcagcgacatcagtgcttcctgcatacgtgcgccaccagaggcggagaagcagatcagtgggcagttatcttccagcgcctgctcaacggcacgcacgaaacgcgcacctaccacagaccccatggaaccgcccataaaggcgaactcgaatgccgcagcgacaaccggcattccatacagagtgcctttcatcaccaccagcgcatctttttcgccggtttctttctgcgcagatgccagacggtctttatacttcttggagtcacgaaacttcagcacatctttcggctcaagctcgctacccagctccacaaggcttccttcatctaacaggctatgcaggcgattacgcgctgtcatacgcatgtgatggtcacacttcggacagacctcaagattacgttccagctcagcgcggtataaaacctgaccgcagctatcacacttagtccacaccccttcaggaatgctcgccttgcgggtgggagtaatgttgcttttaattcgttcaatccagctcattagggacctttctgtctgaacctggttcgatgccagttttatctttggggacgcataatgccatttttgcccccaacagaccatgaatgttgcacattaaaacataacagcccgaaactttggataaaaaagtggtcgaaccgcagagttactttttattttgcggcgcgtgccgcagcgcgtttgtggcgaataaattcgaaaacacctggcaatattgaaacaaaaataatgccaacaatcatcagtttaaggttgctctgaatgaaggggagcgtgccgaagaaatagcctgcgtaggtaaaaagcagtacccacaacagtgcgccaatcacgttataagcggcgaaatgacggtacgacatgtggcccattcccgcaacaaacggggcgaacgttctgacgatcggcacaaaacgggcgagaataatcgttttgccgccatgtttctcataaaactgatgggttttgtcgagataactgcgacggaaaattttcgaattgggattactgaataacttttcaccgaacaaccgcccgatagtgtaattgaccgcgtcacccacaatcgcggcgatcagcatcagcaccaccatcatatggacgttgagatcgttggtctccagtgatgccaacgctccggcaacaaacagcaatgaatcacccggtaaaaacggcgttaccaccagaccggtttcacagaacaaaattaagaacaaaatggcataaacccagacgccgtactccgcgaccagctctgccagatgcacgtcaatgtgcaggataaaatcgatgaggaaataaatcaggtccatatttgcctatgccttgtactcgtcatctatcaggctgtaactacgttggctacagcctgaaatgttccgagcattattctcgttagtccgccagaaatagcgggcccattggcggttttggaagatcatatcggtcagggtaatccaccgcgaccagatatagcccttccgcttttgccgttgctgccgccagcgttctgtcctttgccgccagcaactctgctatccagctctccggctggttgtgggcaccgacttccatcaggctgccgacaatattcctgaccatatgatgtacaaaggcattcgctttgatatctaccaccacataaggaccgtgacgcgtgacattaatatgcataacgttgcgccacggggtccgggactggcactgcaccgcacggaacgaggtgaaatcattctcgcccagcaagcattgcgcagcccgatgcatccgttcagcgtccagcggttcgtaaaaatgggttacccctttactcaataccgccgggcgcagccgatgattgtagatgatgtagcgataacggcgagccgtggcgctaaatcgggcatgaaaatcatcaggtacagctttaacccaacgcacggcgatgtcaccaggtaaattcgcatttacgcccaacgtccacgcagcgtctttgcgctgcgcggtcgtttcgaaatgcacaacctgcccggtgccgtgtacccctgcgtcagtacgcccggcgcagaagacggtgatcggttcgttcgccacctgggagagcgccttttccagcttctcctgcacactgcggacttcgttctgccgttgccagccgtaatacttactgccgtcgtactcaatgcccagcgcaattttataaactggcggttgttgctggtcggacattagtacagatactcctgcaccagtttctcggcgatttttactgccatcagcgcgccgccaaagcgaacgttatcggccaccgaccagaactgaacttgctccggcataccgtagtcattacgtatgcagccaacggaaagatgcggcgtaccagaagcatctcctacctgagtcgggaattcgttctcttcagagagcacaatatcttcgccctgagcaaacgcatcacgcgcttcttctgccgccagcggacgcagtgcttcaaagttgaccatctgggcatgaccgtagaataccggtgcctggacgacgcttgccgaaatcatcagcccttcgtcctgcaggattttgcgtacttcgtcaacgatacgacgttcttcacgcacgctaccttcgctatccggcagtaacggcagcatgttgaacgccagctgacgcccgaagaaatcttcttcgtcaatcggaatgccattgagtaatttagcactctgccccgctaacgcatcgaccgcttttttgccctgggcggaggctgaaatcaggctggtaacgctgatacgtgataaaccgccctgatcaattagcggtttcagtgccgccagcagctggctggtcagactgtctggtacggcgatgacattccggttgcggtaatcggtcagtacaaacgggtttacttccggcaccaccagcggtacgtcgggttcgagagcaaacaatccgctgctgtcgatcaccagacaacctgagttggttgcttcttcaacccaggtagcggtagcttctttgcctgcgacaaaaaacgccagctgcgcctgcgtccagtcgaattcagcggcatcctgcacggtgattgtcttaccaccaaagcgcagttgttcgcctgcgctttcgttacgtgccagtgcataaatttccccaaccgggaactgacgttcagccagcgtttcaagcagggcttcgcccacagcgccagttgcgcccaggacggcaatgttccagccttcagacatggtggtttactccagaaatagcaaagctccctgccaatgttacagcagagagcatgaagaagagattaacgtgccggatgatgaacggcgttaaaacccagtttacacagcaatgatgccgcactggcgtcatcacaaatcacatacagagatgaccattcacggcgctcaagatagtttttgcgcagtttatcgaactcacccggtatcccggcgactttacgcagcggtgcgtcatcgcggcgcacatcatacaccaaatgcaccagccttttcagcgtcggttgatcgagcgggccatgcagcgtaatgcgaccaaactctggcgcgggcagtaatgtatccagcgcaacgtgctgttcatgcccaataaacttgctataagcttcaaacacttgcgtagtaccgcgtgctttaccttccagggtatagcctgcgatatgcggcgtgccgatatccacttttttcagcaattccacgttaagttccggttcgccttcccagacatccagcactacgcttaacttctggccttcgttcaggcaggtcagcagggcggtattatcgacgactgcgccacggcaggcgttaatcaggatcgctcccggtttcaggctgcggatcagtttttcatccgccagatgcagcgttttgtacggaccatctttaaagagtggcgtatggaaagtcagaatatccgcatgctggactaattcatccagcgagcggaaatccccctcatccccacggtcggcgcggggcggatcgcaaagtaaggttttgatccctaaagcttccagtcgcgcctgtaaacgacgaccaacgttaccaacgccaacgatccccacggtacgctcgtgcagtgaaaatccatcgcgttcggcaagcatcagcagggaggagaaaacatattccactaccgcaatcgcattacagccaggtgcagcggaaaaaccaattcccgcctgctttaaccatgcttcatcgacatggtcggtccccgcggtggcagtgccaacaaatttaatgggttttcctgccagcaaagattcattcactttcgtgaccgaacgcaccataagcgcatccgcgtctgccagttgagcgacgggaattggacgcccgggaaccgcggtcacctcacccaaacggctaaataagtcgcgggcataaggcatattttcatcaacaaggattttcacgtttgtgttacctgtatgagacgagagttaaccagacaagtgtgccataatctcgcggccaggcatacttgcgaagatttcaggtataaggatacgtaatgatacaacctatttccggccctcctcctgggcaaccaccaggtcagggagataacctgccgtctggcgcgggcaatcagcctttatccagtcagcaacgtacttcgctggaaagcttaatgacgaaagtgacctcactgacgcaacaacaaagagcagaactgtgggcgggtatcaggcacgatattggtctgtcgggagattcaccgctgctttcgcgtcacttccctgccgctgagcataatctggcgcaacgtctgttggccgcgcagaaaagccattctgcccgccagcttttagcgcaattaggggagtatttacgtctggggaataatcgtcaggcggtcacggattatatccgtcataactttggtcagacgccgctgaatcagctctcaccggagcaattaaaaaccattctcaccctgttgcaggaagggaagatggttattccgcaaccacagcagcgcgaggcgaccgaccgtcctttattaccggcggagcacaatgcgctcaaacagctggtgaccaaacttgcggcagcaacgggggaacccagcaaacagatctggcaatcgatgctggaactttccggggtgaaagatggcgagttaattccagcgaaactgtttaaccatctggtgacctggctacaggcgcgtcagacgctaagccagcaaaatacgccgacactggaatcactacagatggcgctaaaacaacctttagatgccagtgaactggcggcgttatcgacatatatccaacaaaaatatggcctttctgcgcaatcatcgctttcttcttcccaggccgaggatattcttaaccagctttatcaacggcgggttaaagggattgaaccgcgtgatatgcaaccgctgcttaatccttttccaccgatgatggacacgttgcaaaatatggcaacgcgtcccgcgctgtggatactgttagtcgcgattatcctgatgctggtctggctggttcgttaaccccgacgaaacgacagtatcgtgacaataattcccagcaccgcagagatcgccccggcaagaaataccgaagagtaaccaaacgtggtcgccagcattcccgcaagcggcccggagacgccgagggcgatatcctgaaacgcggcgtaaccacccagtgcggtgccgcgaacgtgtgaggggacgcgtttaaccacctccacgcccagcgcaggaaagataagcgaacatccggctccagttaacgccgcgcccgctaatgcgacccacgcccctggtgcttgccagagcagcaacaagcccacggtttctacaagcagagagacgatcgccactttcacgccgccaaaacggtccggcatccagccaaacatgacgcgcatcacgacaaatgcgccgccaaacgcggtaagagtaaagcccgccatcgcccatcctttgctggcaaagtagagcgaaacgaaagtcccgataaccgcaaaaccaacgccttgtagtgccagacctaaccctggtttccagataagcccgacaacgctccacagcgatggacgttcccccgccagggccggtactttgcgcactgtgccgttacaggcccacgccagtaagggtaatgccattgtggtgagcgccagtgcggcaaaaccgtaatggctatgaatcaacaggccaagcggcgcaccaacagcgagggcaccgtaaatagccattccgttccatgacatcactttgccggaatgttttggcccaacgatgcctaatccccaggtcagagcgcccgtcagtaactggctttcaccaaagccaagaatcaaacgcccgacgaccaacagagcaaatttgaacggtgcggggacgggcaaaatcgccgccagcagcaacgcgccccccgccagaccacaagctaacatcccctgaagcgccgaacgttttgcgccatattgatcggccagtcgcccggcgtaaccacgcgtcagcaccgtagccagaaactgaatcccgacggcaatgccgaccatagtgttgccatagcccagttcatgatgaacaaacagcgggataaccggcaacggtaaacctacggtcatgtaggtgagaaaaaccgcaaaagcgatgcgaaagagcgaaaaattggcagaagatcgtgtttcggtttggcttacagcagtcatgcattactccagaatgcagcgcaaggcgaggagtatccccgtctcatctctctgatttcagggttacggtgcgttggcaggatttaacgcgtacgtcttttctgaaggaaatcgacaaagcgggaagtttgcctggaactggcggcgattgtcaatgatgtgaaaaagggaaccatcgggttcccttttgcgttagtgccggaggccgcattggcgcgtaacgtcggatacggcgctggcgcgtcttatccgacctactccgaattaatctttcagcttgcgcattaccagcgtggcgttagtgccgccgaagccgaagctgttagacataactgtggtcagttcgcgatcggtcgtttcggtcacgatgttcagacccgcagcctgctcgtccagctcttcaatgttgatgctcggggcgataaaaccgtgttccagcatcagcagagagtagatagcttcctgtacgccagcagcgcccagtgagtgaccggtcattgctttggttgcagaaatcgccgggctcttatcgccgaacacttcacggatagctgccagttctttcacgtcgccaaccggagtcgaagtaccatgagagttcaggtagtcgattggggtatcaacaccgtgcatcgccatcttcatgcagcgcactgcaccttcgccagacggagcaaccatgtctgcgccatcagaggttgcgccgtagccaacgatttcagcatagatgtgagcaccacgcgccagcgcgtgttccagctcttcaaccactaccataccgccaccgccagcgataacgaaaccgtcacggtgagcgtcgtaagtacgggaggctttttccggggtgtcgttgtatttagtagacagcgcccccatcgcgtcgaattcgcaagccatttcccagcacagctcttcgccgccgccagcaaacacgatgtcctgtttgcccagttggatctgctctactgcgttaccgatacagtgtgcggaagtcgcacacgcggagctgatggagtagttaacgccgtgaattttaaacggcgtggcgaggcaggcagaaacgccggatgccatcgctttggtgaccacatacgggccaaccgctttcaggccgcgcgggccgcgcattgcgtcagcgccgaaaacctggaaacgcggggagccgccgccggaacctgcaatcaggccaacgcgcgggttattctggtaagcttccggggagaggccagcatctgcaattgcctgctccatagaaaggaatgcataaatggatgcgtcgctcataaagcgcacaactttgcggtcaatgaggccagtggtatccagttttacgttgccccagacgtggctacgcatgccggaatccttcagctcctgagagaaagtgatccctgaacgtccttcacgcagagatgccaggacttcctgctggttattaccgatgctggaaacaatgcccaggccagtaatcactgcacgtttcattcaatacctctgtaagtcgcacatagagtaagtttcgaatgcacaatagcgtacacttgtacgccgaacaagtccgatcagccaattaatagagaaatttgcgcagcctgacacacatcgctaagatcgagccaccgcctgtaagacgagtaacttacgtgaaacactactccatacaacctgccaacctcgaatttaatgctgagggtacacctgtttcccgagattttgacgatgtctatttttccaacgataacggactggaagagacgcgttatgtttttctcgggggtaaccatctagaggcacgttttcctgaacatccacatcctctgtttgtggtagcagagagcggcttcggcaccggattaaacttcctgacgctatggcaggcatttgatcagtttcgcgaagcacatccgcaagcgcaattacaacgcttacatttcattagttttgagaaatttcccctcacccgtgcggatttagcgctggcgcatcaacactggccggagctggccccgtgggcggaacagcttcaggcgcagtggcctttgcccttgcccggttgccatcgtttattgctcgatgaaggccacgtgacgctggatttatggtttggcgatataaacgaactgaccagccaactggacgattcgctaaatcaaaaagtagatgcctggtttctggacggctttgcgccagcgaaaaacccggatatgtggacacaaaatctgtttaacgccatggcgcgactggcgcgtccgggcagcacgctggcgacctttacgtctgccggttttgtccgccgcggtttgcaggaagccggattcactatgcaaaaacgtaagggctttgggcgcaaacgggaaatgctttgtggggtgatggaacagacattacccttcccctgctccacgccgtggtttaaccgtatgggcagcaacaaacaggaagcggcaattattggaggcggtattgccagcgcgttgttgtcactggcgctattgcgtcgcggctggcaggtaacgctttattgcgcggatgaagcccccgcgctgggtgcttccggcaatcgccagggggcgctgtatccgcttttaagtaaacacgatgaagcgctaaaccgttttttctctaatgcgtttacttttgctcgtcggttttacgatttattgcccgttaaatttgatcatgactggtgcggcgtcacgcagttaggctgggatgagaaaagccagcataaaatcgcacagatgttgtcgatggatttacccgcagaactggctgtagccgttgaggcaaatgcggttgaacaaattacgggcgttgcgacaaattgcagcggtattacttatccgcaaggtggctggctgtgtccggcagaactgacccgtaatgtgctggaactggcgcaacagcagggtttgcagattcattatcaacatcagttacaggatttatcccgtaaggatgacggttggttgttgaattttgcaggtgatcagcacgcgacgcatagtgtggtggtactggcgaatgggcatcaaatcagcggtttcagccaaacatcatctctgccagtatattcggttgccgggcaggtcagccatattccgacaacgccggagctggcgaaactgaagcaagtgctgtgctatgacggttatctcacgccgcaaaatccggcgaatcagcatcattgtattggtgccagttatcatcgtggtagcgaagagacggcgtacagtgatgaagatcagcagcagaatcgccagcggttgattgattgtttcccgcaggtacagtgggcaaaagaggttgatgtcagtggtaaagaggcgcgctgcggtgtgcgttgtgccactcgcgatcatctgccaatggtaggcaacgtgcctgattatgacgctacactcgtggaatatgcgtcgctggcggagaagaaagatgaagcggtaagcgcgccggtttatgacgatctctttatgtttgctgctttaggttcgcgcggtttgtgttctgccccgctgtgtgccgagattctggcagcacagatgagtgaagaaccgattccgatggatgccagtacgctggcggcgttaaatccgaataggttatgggtgcggaagttgttgaaaggtaaagcggttaaggcggggtaatctgctttggcattgtttgtcggatgcggcgtaaacgccttatccgacctacgcgttacctgtaggcctgataagacgcgataagcgtcgcatcaggcatggtgctccagacgtcacaacttactgctgtgaggcctgctgaaacaggtgttcccacatatcggtaaccagcgcctggtcacgcggtgacaattcacccgcgccaatggctttttccagactctggctaacggttgtatgtaccgcctgagcggagtggtcgtcaccactttccagttctgcgatggctaatgtcaggtggccacgcaaatacccactggcaaacaactcatcatcactggcatggtcaaccataccgtcgattaatgccagaatgcgtgattcaaactccgcgatcatcttctttcctcattgtaaaacgtggcgctggcttcagttgagcgcttccggccacgggaactgttccgccgtaagttccggcgtgtgataataattttgtagtgctttaatgaagcgtgccggacgttcgggaatgccgtttgccagataatccatcacctgcgcatgtacccgccgttgaaacaccacgcggtccggttcgaaatccccttccagattgtcgcagctaacattaaacggatatcccgccgccacgcagaacaaccagtccagcgcctgcggcttcacttcaacatcttcaaactgactttgcgtctgggcatcgcgtccgtccgggcaataccagtaaccgaaatcaaccaggtcacggcgcgctttcccggcaatacaccagtgcgaaatctcgtggatggcgctggcataaaagccatgagcgaagacgattctgttatacggtacttccgcatcagcaggaagatagatcggttcgtcgtcgcctttaatcagacgggtattaaattcatcggcaaagcagctattaaaaatctcaatcaactgctcatagtggtgtgtactgttcattagttcatccccaaccagtggaggatctcctgtccgtggctatcataaagtaatttggcactcatcaccgccgagacgataacgatcatcgggcggatcagcttttgtcctttgctcaacaccagtcttgaccccatgcgcgcgccgaggaactgtcctaccaacatcacaaatcctgtcgcccaaatcactttgccaccgagaataaacagcagcaaaccgccaatgtttgacgttgcgttaagtaatttggcgtgagcagtggctttggcgaggttgaatccgcacagcgtaacgaaggccagcgcgtaaaacgatccggcagccgggccaaaaaatccatcgtaaaaaccgacgcaaccacctgcaattaacgcgaagggtaaaccgtacatccggcgctggcgatcttcttcacccagctttggcatcagtaagaaataaagaccgatacaaattacgaggatcggtaaaatctgccgtaagacatcggcctgaacatactgcaccagtagcgcgccgctcattgagccgacaaaggtcatggcgatattgagtttttgatcgcttaaactaaccactttacggcgaataaagtagatagtggcggaaatagagccaccgcaggcttgcagtttattggttgccagcgcgttagcgggagacatccccgccgccatcaatgccggaatggtgagtaacccaccgccaccggcaatcgagtcgataaaccccgccagcatggcgacaaaaaagagaactcccagcagcagcggggaaaccataaacaggctattaaacgtttccattagatcacgtgctcatccagtagcgcctggcaggaaggcggcaacggaggcggtgtcttcttctcaggctttgttgttcccggttttggaggttcaaaccagctttgcagttctgccccgcaaccatcgcctggtggcggtaaaggttgatcctcacactccagactatcggcaggacaacgtaatcgtacatgcatatgcgcgcgatgctggaaccagggtcgcactttgcgcaaccagtcgcgatcggtgcccgcatcaaggcaaagttgttgtttaatcgccggattaacaaaaatgcgcgtgacgtctttgtcctgggcggcgagtttgatcaagctgaaaatttctggcttccacagcgcggggacaacgtgtttaccgtcgcgggaaactaaatctaacgcttgcgggcgcaagagctgcgcggaggtccagcgtgttttcggcagttgcaggaagatatcgacatccagtccggtctggtggctggcgtgaccgccgttgaaacgaccaccagcaggcatccccatatcgccaatcagcaccgtacccatgcccagattgctcacctggcgactcagacgctggataaacatcaccaggtctgggtgaccgaaatagcgacgctgatcggtacgcatgacctgataatgttcggactgtatcggcaacgtgtcagcaccgacgatacagccattagaaaaactgcctatcgattgtgcgctacccggcacaggttgggttattttttgccacggcgtcgctgccaggctggcgctactggcaagcagggccagcagcgcaatcgcggttttgttcattttttaccagcgtggaatatcagtcttcacatcggcattttgcgcccgttgccgtaacaggtgatccattaaaacgatcgccagcatcgcttccgcgatcggcaccgcgcggatcccaacacaaggatcgtgacggcctttggtgatcatctcaacttcttcgccaaagcggttaatagtgcgccccggcacggtaatgctggaggttggcttcagcgccatatgggcaatgatttgctgcccgctgctgataccaccaagaatgccgcccgcatggttgctctggaaaccgtctttggtgatttcgtcgcggttctggctgccacgcagcgctaccacgtcaaaaccatcaccaatttccacgcctttcaccgcgttgatgctcattagcgcatgggcgatgtcggcatccaggcggtcaaagaccggctcgccaagtccggcgggtacgccactggcaacgacggtgactttcgcaccaatagagtcgccttcttttttcagcgcgcgcatcagttcatctaacgcgtcgattttgtccgggtccgggcagaagaatggattttgctcgacctgagaccagtctttgatttccagtggaatgtcgcccatctgggtcaggcaaccgcgaatctcaatgccaaatttctcggcgagatattttttggcaatcgcccctgccgccacgcgcatagcggtttcacgggcggaagaacgtccaccgccgcgataatcacgcaggccgtatttttgttcgtaagtgtaatcggcatggcctggacggaagacatctttaattgcgctgtaatcctgagaacgctggtcggtattttcgatcaacaagccaatgctggtgccagtagtaacaccttcaaaaacaccggagagaattttgacctgatccggctcacgacgctgggtggtatagcgcgatgtcccagggcgacgacgatcaaggtcatgttgcaggtccgcttccgtaagcggaatgcctggcggaacaccatcgacgatgcagccgagcgccagcccgtgcgattcgccgaaggtggttacgcgaaagagttgtccaattgtgtttccagccatcacggctccgttattgttgtgtttgcgtgtttacttaatctttataaatcgcgaaatgttcacgggccgccagcagctgctctttggtgagcataaacacaccatcgccgccgttatcaaactccagccatgtgaacggaacatccggatattgttccataagatgtaccatgctgttgcccacttcacaaatcagcacaccatcatcagcgaggtaatctgccgcgttaccgagaatgcgacgcgtcagtttcaggccgtcggtgccagatgccagaccgagttccggctcgtggcggtattcgtttggcaggtcggacatatcttccgcatcgacgtacggcgggttggtgacgatcaggtcgtactgcactttcggcaagtcacggaacaagtcggaacgaatcggaatgacgttgtggatcaaaccgtgttcttcgatgttctgttcagcaaccgccagcgcgtctggagagatgtccaccgcgtcgacttccgcttccgggaaggcataagcacaggcaatggcgatgcagccgctaccggtacacatatctaaaatgtgctgcggttgcttactgatgagtccggcaaatttattgttgatcagttcaccaatcggcgagcgcggcaccagcacgcgttcatcgacgtaaaattcatgaccgcagaaccaggctctgttggtcaggtaagccaccggaatgcgttcgttgacgcggcggatcacgcgctcaacaatacggtgtttttcgctggaggtcagacgcgcggtgcgcatgtcttccggaatatccagcggcaggtagagcgaaggcaacaccagttgcacggcttcatcccacgggttatcggtgccgtggccgtaccagatattcgccgcgctgaagcggctcaccgaccagcgcaacatgtcctgaatggtttgcagctcatttactgcttcatcaacgaaaattttatccacgtattcctccagggcatgatcgcaataatttcggcggctagtttgccatgaagatgacgataaatcagcattcacgcgcggtgagtgaggaaaaatacgtttaaaacgatcgattgtgctacgagtcgggtaaactgtaggaaaattagaaatagagaaagataaatgaaaaagaaaacaacacttagcgaggaggaccaggcgctgtttcgccagttgatggcggggactcgcaagattaagcaggacacgattgtccaccgaccgcagcgtaaaaaaatcagcgaagtgccagtaaagcggttgattcaggaacaggccgatgccagccactatttttcggacgaatttcagccattattgaataccgaaggtccggtcaaatatgttcgcccggatgtcagccattttgaggcgaagaagttacgccgtggcgattattccccggagttgtttcttgatttacacggtctgacgcagctacaagccaaacaggaactgggggcgttgattgccgcctgccgccgtgaacatgtgttttgcgcctgtgtgatgcatggtcatggtaagcatattttgaagcagcaaacgccactgtggctggcgcaacatccgcatgtgatggcatttcaccaggcaccaaaagagtatggtggcgatgcggcgttgttggtgctgattgaagtggaagagtggttgccgccggaattaccctgaatattaaaaggtggatgagtcgggccatttagccttggatactggcgtctcaaccctggcgataatgaacgtaataatcgggcattaattgaaaaacgtaagcagctttccgacagccttctgtgggctaatggcattgacccttcagaggggcttgaggatgacgacctgctgcaagcgcttatcgacgaattactcaccctcgtcgacggttatctggcacctttcgctcccgtgatggcgaatattctaaaaaactggatgaccgcatgacataacggacaacggggcctgatggccccgttgtgtggtgtatacgctacagctcgttgagcgtgtactggaagcggcaggtggaatcaatcggctggcggctgctggtatcgacacgcaccaccatgtcgtgcagttgcttgtcagtgatgggatgcctgtttggcgccaccgtaacattagcattatcacagcctgatgatgaaaacgtgatcatttgcgcaacccagcgacagtaagcgccctcttcattcatttgcgagccatcacatagtttgccgtctttcatcagataggttgaaagcgttttttcaatcacaccccccgtcgattgcaaagacagtgttttcgttttattgatatagttttcatcccacgaaacatcatacggcgtaactgacacggttgggcacacggacacggttgcatttggtccataatagatatctttatcaacagaaccgaccacaacctggctggtggctctgatactcactaaccacgggcagcctcccacatcaccatcgacggtaatatccagaggcagcttgagacattcccagcggctgtctttggcttccagtgcctccatgcccggacaaaatgaattatttacaattgtcccatcttttaccgtaatcgtcggcgcaggagaactgcccgttcctgtccatgtgcgattgggtaagttgccaagcgtcataacataattactttgataataggtaccgtagtaaacactcgaaacctcagcaacatcaagatacagttcgacctgactattccagccaaacgtagcatagtagatatacacattacgaaatgtctgccccatcccggcccgactaccgagcataaaaaccatcaggatcaaaagacgaaacagcaagttagtttttttcatcttatatgtactcaaacgttgcggttaaggaggcggtaaactcacccatcgtcacttcccgcccgcttttcgcctggagccaggcattaaaattcagattgttattgccgttactcagcacaaaggtcgcgccgctggtattgttaatcggcaccggtgttccatcggttttttccatgccaattccgacaccttgcgccgccgaagatacatccagcgccagaaagcccggctgttcactgtcttctgtaccggtcagcgtcacccggacttcatactgagctggccctttgcaatctttgagctgaaacaccactggcacccgcgcagactgcccggtcaccatcaggtctttacggctaacggtgggaaaatgcacctccgccagcgactcgccctgaacgactaacgtgcaggacttgctgagtaaattgccgtagaaatgcaggttgtcagccgcctgaacatggggcgtcagcagcaccgtcgccagtacagccgcgcagtgagatatccgttttaggttcattggtaatccacctgtaatgttgcgtaggcagaaaaggttccgtcgctgagcgccgcatcattggctttcaccggcacagcttgcagcgttggcggcgttgacgggtcaattttcaacggtgttcccagcttaaacggctggccgttttgctgtagctcaatccccaggccgctaacgtccgtttcaatggcggaatcatcataaggggtttggctgcccgtccaggtcaggctcatctcccaggcgtcgtcgcgcacatcggggtcacatgtgatggtgtaaggcacatcctgacggaaattatcgccgttaatgttgtcgataatgacgttgcgaaactcaacttcgatcgtcttaccatcgctgatagtacaggcgggtggcgaaaccagcgtgccgtgaaaagtaacgtcgttaatcgcggcctgcgccaggccagcaaaaccgtaaattaagcaccatgcgagtcgtttcattggtagtccaccaccatggtcatggtcgcattaaactccgatgccatcagttccacaccgctctgcttcaccggaacggcttcgaagtctggctgagtattgatgttgaacggcagccagctactgttacccactgccaccagcgaatggtcagcggcattctgaatacgaatgccaaaaccgctgattccagtactcagcaccgtttcgccgttgatggtcgtggtggtggcctgaagctgcatttgcaggtcgtcgctgacactgtttgagcagttcagggtgtagcccactgcctgacggtagttggcaccatcaatgcttttaataatcacattgccgaactccaccgcgcttccctttaccgaacagggcggcggtccatccaccagcacgcgcaacgtcagattgacgattttgccgcccgccattgccgggaaaacggtcacgccacaggccagcaatagcgcggcagatccggtcagaaagaacgctttcatgttgcttctcccgttatcaacctttgctgctttgatcttcatccaccttgcaggtgttcccttcacaacggaagatcagcggcatgcgcgcgccgtagtcgttgatataggtcagcaccggggcgctcgccatttttgcctttaacggttgtgacgttttcggtggcatcaccagcggtttaaacccggcggcagtcagccctttcttctgtgtgctggcatcgctgatgatgacgtggtacggcgtcgggttattgacggtatagtcctggccactgcgcgtgagtgtgaccttaaactgccacggtcttctcatgtcaatcttctccagcgcctttggtcgccagaacagcttgatgcgcgtttgcagcgcaatttgcagggtgttggctttcccggactttggcgggatctcacgcacgttgtagtagaacaggctttctcggtcggacggcagtgtgtgaatgtccggcagcgcctgaatcttcacctggccgttcatcatagcgtcaatacgctgcaccggcggcagtactgccagcggcgaagtgattttgttgcccttctcgtcttccagccagctttgcgccaggtaaggcagcttttcgttgttgttacgcaacgtcacgctgatcgatttatcgctttcgttaaacaccagacgggtgcgatccggggtgaccgatgcatgcgccgtcaggctggcggtggtaagcagtgccatcagcgctgtgctgacgagcattggacaggataatttataagacattgatcgttccttaatcagattattgagttgctgaaattgacgtcggcgcttccgttggtgtgacttgccgcgtctggtcctgaataacaggcttaatttctggcgctgaagaatcaggggctgccgttcccttttgttcacacggcaacaacagaccgctgaacaaatcggcaggtagcggcttcggcaatacgatctcgcattgtgcgctgccttcccagaacaccatcatatgctcgtccgcattgacccccgccagatagacattgccttcatcatccacaatgccaacctgctgctgctcgtcgtttttcacttccgcgccaaacggcgggtagctaccgtcacgcaaccgcagtaccgccatcgctttttgcccgctgatcactttgaatttacgatagccgattgcgccttccgtcagagtcgcctgcaccaccgactgggtggcttccgcatcttccggcaagttgtttaaatcgatatacgcctgattgcgatagtagttgttaatatcggcgaccaccgccttgccaaacatattggtgtacaccggcgcgccgttgctttcgaccggcacgttggcaatcccgtcggcgtcaatcagcaggcgcgtgccgcccatgttctgggtacggtgcagcgccccaccatgcgcggtcagcgttgccccgccctgtaaggcgatccccgccgaacggtattccccttcatggtagttggcgctgagatcaaccttcgccagcgaaccgtcgtggctcagataaccatccgcgctgccgtgctgctcgctggtgccaacgttaacctggtagtgcgttgcgtcatcgacgcgcttaaagtaaccgacctggctgctgtccgacccgctgccgtaggaaccgttgtaggtcacggtgctgctgtcgctccacggaatgctcatactgaggtacatccccttatccgcattatcgtcatattcgtagcgatagccggtcaccgagatgctcatgttgcgaatgctccccatattaaaatagtgggaaaacatcaggttatagtttgtctgttccgggcgatcccagtaagtacgatgggagtagttgagatagatcgaaacacccgcagcggcaaagttctggttataggtgatcgtatacatctctttgtcgttaccggtccgcgccatgtccgactggttcgcgtccagatactcgctcatggtcatgaagttcttttcggagaaacggtagcctgcaaaggtgacgcggctgttgagttcgtcaaagtctttggcatagctcacgcgaaaggagttgccgtccagttttcctttgccgtatgcgctgtcatgatccaggttgacgtgcgagtgagtcacatcgaacgccagcgcgccaaactgtgcgaggtcgcgccccacccccatcgccgccgactgatagtgtttatctgccagcgcaccaccgtagagcgaccagccatctgccaccccccatgacgcttctccgccggagaaaaagccgccttcggtcttgtggttccagtcttccggacgccccatcatcactttgtaacgcacctgcccctggcgcgtgaggaatggcatagatgcggtcgtaacgtcatattcctgcacctgaccattctgttcttcaacgcggacgtgcagtgtgccggagacggagtcgccgatatcctgaatgcggaatggcccggcgggaacctgggtttcgtaaagtacccggcccatctggctaatggtgacttttgcactgctgtgcgccacgccggaaacatccggtgcatagccgcgcaggttgggcggcagcatctggtcatcggtgctgacgctgctgccgatatagttaaagccgtcgaaaatatcggaattgagataatcttcccccagcgacagcttcgcttttaaagagggtaaggcccgccaggcgtaataacggctccagtcccagtttttgctcgttgtactgttactgctgtcatcgtcgtcatcgttgctgcgggtgtgctgataatcactttgccagtctgcacggaaacgccatgcccccaggttcgccccaacggtaccgttgccgctgatatcatgtgagtcctcgcccccctgctcctgatggcgagtttgcgcattgaggctgtagtcggcaatcaggccaggaataccgtcgtcccagcgtgagggagggtcccagtcgctgctggtatattcgaggtaagcctgtggcactgtcagcagcaacgccgactggcttaaatcattctcgacttccatcccgtctaattgacctggtttaaggcattcatcgttgtgcgtccactgcaggctttttgctatcccttctttcagccccagcgccgccactaactcaggtgtcaggcaggcatagttttttgttggatcgttttcagagacgtaccagttaatgtcgtattcatcagaaaggggttgtttatttataaatacacgtaaattatatttacccgcgtcgacataccctttttttgaaaacttaccgagatcaattttcgtatcgccctttaactcaaggaaacgggggtcaaattgaattgaatcatcagcccatgcattgactgacccaccagagattgccagcgcaatatagcaggcgattccccgcagccgaaaatttgagtgattaggcatacacatatccgtttgtgaaacagtcgtaaatctgttgcgtgttgaataaccccacagcagaacgctgtggggttgtcacatcagagataagtaatctggaatgtggtcagggtttcgaactggccgagatccggcgcatcggtttcacccaccagccaggctttaaagttcagcgtttgcttgtctttacccttgctggttgaagtatccatcacgattggctgaacaatcttttcgcccactttataacctttgccatgggtatcgccgattaccaggctcacgtggttcatggcaacaccgctgtcaacattgaataacgcatagttatccgtgttggctggccccgcgtagttagtaccggtgaacgtggtctccatgtttgtttcagtggtaaacacgcaatcctgtaaacggatctggaaatctttcggtgtggtagtgccaccgccggtcagtttagccgcaccgatgtcacccatatcgacttccagtttgtgatcgtctggaacgatagagcacggggagtcttcaatggtgccgtagaagcgcgcggtaccgttgttgcctgctgcaaaagcagaactggaaacaactgcgcccatgaccatcgccgcagcaatggctgttttggcaaacttactcattatttgtccttaaatcattaagagttataatataatcacctgacataaaattaatatatattatgcccgatatttatagttagccattgaacatatacactccaatataatcatagaatgtaaacaagtattctctggtgtgtctgtatgttggtcttatctataaaaaaactcaatttagtaatacttaaacactttatgtagattttattaattaatacatctacaaaatactttcaccactttccaacaaaaaaacatgcgaattatcaacaaaaaaacaaaccattataatcaacaaaaatgaattgcttataaagcacactaaaaaaattataatgaccttaccattatttattgctaaaatttaatattaattaaatcaataaatatatattcaagacacaaaaccattatcttctttattttattacgggattcaataatgggaaaatataataactatcgagagttgttaaatattaacaacatttagacaagaaaaagaatgattgtatgacggagaaactgcccggtgtacgcgcacgtaaccgggcattgattgcttaaattgcttttgccatcttcaaattacaagggctcatttgccagttgaattggccttttccgctttcatcaagcgttacgctggcaatcgctgaagtggtaaacataggcggcgtttcgcccggacataactcggcaaccagatacccgactaacggtaagtgagagattaccagtaccgaagcaacaccttcattggtcaacgcctgcaaataggcgccgaccagaccaacatcgccgcagggcgttaactccggcagaacttctgcactggaaggcaggttcagacaatcccctacttcttccagtgtttgctcggctcgcaggaacgggctcaccagaacgcgttcgatttccactttttgacctttcagccagttcgccatcaggcgagattcgtcacaaccgttagtagtcagaggacgaaccgaatcactggcggcatcgagggctgcgtcgccgtgacgcatgataaaaacttgcatattgcaccgcttttgttaaccagattcgcccgttttctttcatctgaaaccagagaaagaaaacggtggccggcattgtgccttatccattcaccgaatgaaacgctgttttttacctcaatggcgtaagtatagtcaatatgcgtttacattttgagcaacactccgccattcagcgcggattcatatagctttgaccttcttattgcaggtcagttgcagttgttttccaaaaactttccccacgcttgctcatctcgactaaacgctcgcaaggggtaaaacgggaaccatactgcgtggccagtcgttgcattattgcaaccacttcgcctgcgccgagagaatcgatatagcggaacggtccaccgagaaatggcggaaaaccaatgccaaataccgcgcctatatccccgtcacgcacgctacggataacctgctcgtccagacaacgtactgcttcattcagcatcaacatcacacaccgttcagcaacctgcggtgcggagagtcgcccctgcccttgtgcgccaatgagcgggtaaatggcgggatcgacctgttttttgcttttacgccctttctgaccataaagatagaaaccccggccattttttctgcctttgcgatcgtcgttcaaaattgaagaaacaacatttgcaggcgcgctaaaacgttctccataagcggcttccagtacaggaataattttagtcccggtgtcgattcctacctcatccaaaagttggattgggcctaccggaaaaccaaatttcaccagcgcggcatcaatgtgctctacccgttcaccttcggtcaacatgcggatagcttcattaatgtaaggcgctaaaatgcgattgacgtaaaacccggctttgtcacgcacgacaatgggcgttttgccctgttttttcgccagttttactgtggtagcgatggtttgcgccgatgtccccgcatgaggaataatctccaccagcggcattttttccaccggactgaagaaatgcaggccaataacttgctcaggtcgcgcggcgtgagcggcgatatcggcaatcggtaaagatgacgtattcgaagcaaagatggtatgagcggcgcaattttgctccacttccgccaccatctgttgttttaattcgagattttcaaacaccgcttcaataatcagatcgcgatgggcaaagccgcgatagtccgtcgttccggagattaatgccagctgtttgtcacgttcgctggctttgagatgacgacggcgaactttgccctccaactgatcccagctgtacttcaatgcatgatttatgccctgcgggttgatatctttaattctgaccggaagccccgctttacaagcagtgacataagcaataccgccgcccatcaagccaccacctagaatccccacgctgtttaatggcgcaggcggcgcatcactgccgggatcttttttcacttccgtactggcaaaaaagatattgcgcagcgcctgtgattgcggcgtcatcgccagttcaccaaacgcccgagcttcggcgtcatagccactgctggtcccctgcgctaaaccggtttcaataacgtcaagaatgcgtttcgtcgctggatagttaccctgagttttttgctctgttttcttgccgaccattttgaacagcagcgcacgacctaacggccccgccagaatacgctcgcgtacaggtagagggcgtgaagatggacgatcctgctttgccagctcaacagcggcttccagcaaaatggagtgcggaacaacgtcatccaccagccccagctttaatgcctgtttcgcccgaagttgttttccggtgaggatcatctctaatgctgtgctgacacctatcaggcgcggtaaacgctgggtgccgcctgaaccgggtaacaatccaagttgtacttcaggcaaaccgagtaccgttttaggatcatcagtacacacgcgaccgtggcacgccagcgccagctccagcccgccgcccaggcaagcgccatgaatagccgcgataaccggaacgggcaaagcatgaatctccgccattaactgttgaccctgccgcgccagtgcttccgcttcttgcgccgttttgcagttggcgatcatattgatgtctgcaccagcgataaagttgtccggtttcgcggagataaacaccacaccgcgcagatctttattttcgcggagttgtttaataatggcgcgcacctgcgaggcaaactccgccttcagggtattcattttctcacccggtacgtcgatggtgataacagcaatgttgtccagacggacattaagggtaaacgctgatgccatttccattattccgcctccacaactattgccgcgccaagcccacccgcagcacaggcggtcactaatccaaatccaccgccgcgacggcgaagttcatgcaatgtctgggtaatcattcgcgcgccggtcgccgcgaagggatgcccgtaagcaatcgaaccgccaagcacgttaaatttgctatcgtccacttcgccagtggcatgtgcacgccccagtacatcacgagcaaaacgttcactacccagcaactgaatattcgccagtgtctgagctgcaaaggcttcgtgcatatcgatcaatgtcagatcgctcattgtcaaaccggcacgttccagtgccagcggcgttgaccaggccggaccgagcaacatgtcctgccagacatctatcgcagtaaatgcgtaactgcgcagataccccagcggtaccagccctaattctttcgcccgcgattcggtcatcaggatcaccgccgctgcgccatcggtcagcggcgtactgtttgctgccgttaccgtcccgtgtttacgatcaaacgccggacgcaactttgcgtaatcagcaagcgaggaattaccgcgaatattgttgtcttcggcaagcggttgtttataaggagggataaaggcagtcatcacctcttctttgagtttaccgtctgaccacgcctgagcagcacgctgatgcgaacggtgcgccagtgcatcttgctgttctcgggtgatgccgtaggttttcgccatttgctctgcggtgtcccccatccgcaagccggtagaatactctgctaccgcaggcggtacgggcattaagtcgcgtaaacgcaggcgagagaagagtttcaggcgctggctcattgtgcgggctttgttgacatcaaccagtacgcgcgccagttttttactgacgccaattggcaatacggaagaggaatctgccccaccggcaatccccgcgcgaatagttcccgccatcaggctttctgcgacgtttgcaaccgcctggaaactggtagcgcaagcgcggctgacgctgtaagcatctgtatgcacattcattccagtaccgagaacaatttcacgcgcaatgttgggggcttccggcatttgtacgacctgaccaaagaccagttgttcaatcacttcagcggggatctcgctgcgtgccagcagttcgcctaccaccatcttccccaaatcaacagcaggaatgccatgaaaagccgtcgcctggcgggcaaaaggcgtacgtaacccgctaacgatggcgatacgatcgccctggcgggtaaccagcggtaaaacctgacccataacactcccctgtaaaaaaataaataaagtggtctgacctgatcatagtcttaaccatttttttacatttagccaagcggagaaaaaggaaagtgggagctatgacacagtgaagacaggagaaagaaaagaaaacacccctgccagcaactgacaggggcatacgtacccgagaggaattaacgcagacccagctggaagatcagcatttcagcttcgcaggcaaaagtgaaatcgatatccaggcgcacaccgtcagactcttcagtgaaagtcggggtgattttgcacggttcggattccacgctacgggctttttcagtcagcgccgccagcgtttgttctgcttctgcgcggtttgcaaacacacggctgtaagacgcggtgcagtcggagttgtccataatggtgccaacatccatacagcagcaaaccggggtttcatcagcactacatttactcatcgttgatttcctctgtatgtgcacccaaggtgccagataaacgttgtggatattttacgcttccggaaagtgctgctccagttgttaattctgcaaaatcggataagtgaccgaaatcacacttaaaaatgatctaaaacaaaattcacccgaatccatgagtgcgccacctcccaattttgccagctggatcgcgtttcttagatcatatctgaaaaaagatagaaacatacttgcaacattccagctggtccgacctatactctcgccactggtctgatttctaagatgtacctcagaccctacacttcgcgctcctgttacagcacgtaacatagtttgtataaaaataaatcattgaggttatggtcatgagccagaaaaccctgtttacaaagtctgctctcgcagtcgcagtggcacttatctccacccaggcctggtcggcaggctttcagttaaacgaattttcttcctctggcctgggccgggcttattcaggggaaggtgcaattgccgatgatgcaggtaacgttagccgtaaccccgcattgattaccatgtttgaccgcccgacattttctgcgggtgcggtttatattgatccggatgtagatattaccggacattctgatttaaccggtcagagtgcaaatgctaaaaatatcgcaccgacagcatgggtacctaacctgcactttgttgcgcctattaacgatcagtttggttggggagcgtcaataacttccaactatggcctggctacggaatttaccgacaactacgctgctggtatctatggcggtaaaaccgatctgcaaacaatcaaccttaaccttagcggggcttatcgccttaacaatagctggagttttggtcttggttttgatgcagtttatgccaaggcaaaaattgagcgttacgccggttcgctggggccattgttgtctcaacagttgattgcccagggtgtacccgcttcattaaccaatggtattaatactccggactctcaaattgctcatttgaaaggtgacgaatggggctttggctggaacgcgggtattctttatgaactggataaagataaccgttgggggctgacatatcgttcagaagttaaaatcgacttcgatggggattacaaaagctccattaacccaaatctgaacaatattttgggtaacatgggcttaccgtatggcacgatgggggcaacccaaaatggatccttaacgctgaacctgcctgagatgtgggagatttctggttataaccgtgttgcgccgcagtgggcaattcactacagcatggcctataccagttggagccagttccaggaattgaaagcgaaaggcgatagtggtcagactctgttctataaagatgaaggattccgggacgcgtatcgtatcgcgttgggtacaacctactattatgataaaaactggaccttccgtaccggtatcgcttatgacgacagcccggttccggcagataaacgttctatttccattcctgaccaggatcgtttgtggttaagtgctgggttaacctacgcatttaatgaagatgcatccattgatgttggcgcatcttatatgcatggtcagaaagtgaaattcaccgaaggtgaaggagcggcagcttattccttcgagtctgaaggtaaagcctggctgttcggtactaactttaactacgcgttctgataacgcgttagcttaataagaaaaaaggtgagttttgcgactcaccttttttgtttgtttcttattcagaatcgatatcttttaaatcatcctgaatcgcttgcgcgttcggattttcctgcggtttgagttcaccgccattagcgatgaaatcatgacgctggaagtacgcttcacgcaccataatataaggatcggaggactgacgcagcagaccgtcggaatccaacaactgcgcacgagtttctatcccttcaagcgtccatttacccacagacatcggccaggtcagccaggaaagaaccgggtaaagactatccgccatatcaccaccgtcatcacgcagcgtgaagctaccgtagaacggtaactgaacgtacggcccataacccacaccataatgaccaagcgtactaccgaagcggtgaggttcagtccgttgcagtttcgggttcgccatccctgcaacatcaataaagccgcccattcccaaaatggtattcaggaaaaagcgggtaaagtggaccatcccctgataagggtcgccctgcaagaagtagttaaccatcaccgcaggttcttcaaggttgccggtaaagttgctcaaaccgttacgcgcaggttgcggaacataatcacgccaggcgacagcgaccggtcgaacaatatacgggtctaatacattgaagttgaagttgtacatagtgcggttaaacccttctaacgggtcagaacgcccttgctgatctgtaccggaactcgcacaccccaccagaagcgtagttcccagagcaagcgccgacaggcgaagcttcataaatgtctccctgtttttttatggcttatgcagtttgccatccatgacggaacgataccgtatccgcctgtttaggtgtgggcgattgtaacagcacgtcaactgatgtccagacgccctgatttgctgatttgatcatagcctggtaatcgccgccctgtaggctacttgattctatagaaacagaaaaaggcaaacgcggccttttctacattttcagagtaactcccgccagttgcgagcaaaaaagccgctacgctttagctatacgtgctaattcaagagaagagaccatggacaacgacaaaattgatcaacacagcgacgaaattgaagttgagagcgaagaaaaagagcgcggtaaaaaaatagaaatagatgaagaccgactcccctcccgggcgatggcaattcatgagcatatccgccaggatggtgaaaaagagctggaacgcgacgcaatggcgctactgtggtcagccattgcggcgggcctgtcgatgggcgcttcgctactggcaaaagggatatttcatgtcgaactggaaggcgtgccgggcagcttcttgctggagaatctcggttatacctttggttttattatcgtcataatggcccgccagcaattatttaccgaaaacaccgtaactgcggtactacccgtcatgcaaaaaccgacaatgagcaacgtcggcttacttatgcggttatggggcatcgtgctgctgggtaatattatcgggacaggtattgctgcgtgggcatttgaatatatgcctatcttcaatgaagaaactcgcgatgcatttgtcaaaatcggcatggatgtgatgaagaacacccccagcgagatgtttgccaacgcgatcatttccggctggctgatcgccactatggtatggatgtttcctgcagcgggtgcggcaaagattgtggtgattatattgatgacctggcttattgccctgggtgacaccacccacatcgttgtcggttctgttgaaatcctctatctggtgtttaacggcacgctgcactggagcgatttcatctggcccttcgcactacctactttagcggggaacatctgcggcggcacctttatcttcgcgttaatgagtcatgcacagattcgtaacgacatgagcaacaagcgcaaagtagaagcacgtcaaaaagcagaacgtgcggaaaacattaagaaaaatgataaaaacccggcataaatggcgagggtttaagcaatcgagcggctgtgtacttaccccgtagtccattagcgggtatactcatgccgcattgtcctcttagttaaatggatataacgagcccctcctaagggctaattgcaggttcgattcctgcaggggacaccatctatcatccccctcgcaataacccacttacaatcagtgagttatcttaaaatccttagtatagtcaaccagtacttcgatatgtgaacgcaaatcatcatgcattcgtgaacttaactggaaacctcccccattcgatgtcaaaatgactaccccaataagttgccaataatcaggctaatcaatacgggtcagtcttgctggtcagtgaccataaaaatgtcacctcatattagacacagcaaataattgtgtcgattaaacatactaccttcagcataaccgttcctgaaaaattattatattcagtaatctgaataaattactggcctgctatttttcttagcaaccatatttagcagcaagccagcaaatctgaatgattacagatgctggcctgctgaatctcccttctggaaatcgtcagaatctagtgattacttactttgttctggtttctcttcattcttattgtgcacttccactttgggtaactgattaaaaaccagattttctttttcaaccagagccatgacttctttggtgatatcagctgactcgttatgcgcaagcacaacacctgaagacaatacagcaatatttttaggattgtcttttctccatgtacctatggcattatctatcgcacgggataacaccatttttgcgctattttcctcaataacacattgtcgctccagtttttgtctggcatcaagaagcagcgcctctttattcgcgttatctgcgaatgctttttgcgcatcctcatagcctttttcaagaatactcttaacctcattcagatgctttctgaccatgtctccggcggcagactgattataaatagcatcgatattaacaactgcaatttcttttgactttttcatataaaaaacaccagtaagtacaatcagcaacagcagcactactgcattaacaacagaaaatttcattacagaactcattatgacaaccctgaggtggcaggaggtcccctcctgccactgtgtgattagaatatatatttaatacccagcattgcctgggcatcactgtaccctttatcgccagcctgaacaccaacattgccccagacattcaggttatctgacaatttaccctgaacacccgttttgacttcagcaatatttgtagctccgtcctgactgagtgccgtattatccattttgacaccccagctccgtgtattatggatccagttaacttccacaaatggctcaaactgatgcgccttattatcatcagacgcactcttacctttcaggtaagttctgacgcccagacgactctggatattaccgtctccgctgagctgaactttcgtgccattcttctccgtatgctcactggctcttacattcatccacgtgatctgggactgcggctgaatataccagtcatagtgactaccctggctaccggtaaattcgccggctttaaaggtataacccgcttccactgaaccggtaaatccacgggatttccaggactccgcagccagtttttcaccattaacggtattattaaaccatccgtactggatccaggtatcgacataagccccgttgtcattaccgtcattctgctgccacgttccgtataaaccggtgctgtatccattgatcgcacctttagatttatatcccgaaagcgaggatgtcgtggaactcttctcatttccataaccggccataatcccctgttgcagacggtcctgaccgtcagtccattgcgcaatgctgccacccagttgcacaacataacggttactttgcgtattcagctgtgaactgctgtccttccagcgattatgaccgccgatatgacgcatccacatacttgttgctttcttctcaccagtaaacacatcggtatagtaagtttccccctcacgatcagtgcattctgatgttgaacagcgtgttggctgccagctatgttcgcaatataagagcccgcttccggacgatagaccttctgtacaggtttatccggcgtggggtgtggctgtggctgcggttgtggctgcggctgcggttgtggctgcggctgcggttgtggctgcggctgcggttgtggttctggcggcaattcagaacgcagataccagttaccgtcagtaccacccgcattacctttatgcaggaaatattcccacgcccctgccaccgcacggttctgcagtctgaagttaccgtcagactgcccaccgacatgcacaatctcaatgccgtcagcggtctgagccccctggccccggacattattcaccaccacgccggtatcaccggaggtgttacccgtgacaatcagtttgtcagtggtagaagtatcatcccccagcacggtattgataattaacgtaccgccaccggtgtaatcgccatttacggtcagggtatttcctgtcttaccaccggccagacgaatgacgccggtattggtcagtgagccaacggtaaaattgcccacctctgccgtttcataacctgagagagcattcagtgatgccagtgttccctggttattaacctgacccgaaacggtccccagcccactcagtgtgccgccattaagaacatgaatgtttttggatcctgacaacgtcgcgccagcggcacgggtgactgaatcatcaccgacaatcagaacgccactctcaaccgtggtatcaccggtataagtcagctcatgattaatgatcagattacccgccccctgtttcaccagagcgccggagccagtaatatcattcttcagtaaccagtttccactggcggtaagccaggtgacaccatcactgtcaatcagcccggtgcccaggtgtttttcatctgaagcccgcagagcagcatctttctgcacacggaattcaccgctgaaattactgttatccccggaaagcgtcagatcagtggtgttcagtatacccactgaaccttctccggaaagcgatttactcaggttactgctgactccgctaccgtcggcgatatcaatcgccaggcgatcattaaggctttcaaagctgatggagccctggcttcccagcccctgtgcgccgttcatttcaaccagcgccccctgggtaaggctggcattaccggtaaacccgatattggtgccatgtaccgtcagattgctgcccgtgacagccagcgttccctcaccggacagcacgttgttttcaatgatgccaccattatcatcccccggctgacgctgcgtgccgctgaccgttagtacactaccgctatcaagctgaatgtgcgctcccgtttctgtctgcagtgcaccgacagtctggctgtatccgtttgttctgaagacggcattgctggcgacgttcagattacctgttgcgccaagtacattatcatttgccatctgtaatgtgccgctgcgcaccagcgtatccccggtgtagttattaccgccgttagacagtgtgacaacctgccccgcagcttcgatggccagatcccctgcccccgttaactgtgcgccaagatctgtctgcagtccctgggcattcgctctcggtgtcagcaccagcgctttatcaccggttccctgtaaatccagcgacttcagcccatagcctatgtacagtccgtcacctttaataccgtcggagcttcccagcagcttatagtcataatttccctgagctacaacttcaccgccctgagtgacatcaaacgtctgactgtgagaaatagcctgcccgttttcatccaccagttgcagttgcccgccagtaccggtgacggtacccgctgcattcaccagcgtgaccagggtctgcgcatcatcctgctccagcaaattcttacgggtatcaacagccggaatatcattaatcacttcatctggcatggtgacctgaattgtgcctttcccccggatatccagcgtacctgcagcagaggtttcaatactgttgctggcaatggtatcgcccggcataacggaaccaaaaatcagcgttccgccattgaacccaagaccgccaatctgctgaacaccggagccaaccgttgtgatattcccggtttcagacatcagcattgcatgggttaacccgctcgtattcagcccttccagagcaaagctactagtacccagcttcagagttccggcaaattgatccccgacgttatggctgaattcaaaagcagatgtgtcggcatcaagacgggcagacagtgttcctttgcctgttaacagtggatcaaaggtaaagttgcctgcaactgcgggaataatggccagttcgctgcccgattcaatatcgacggaacccggaccgttccccccatcggtcagcacaagagcttccttcagagtgacaagtgaactgttcttcagcccgacatgttcgaaattctgtagttttacaacagaatccagcgtatgaatggcgttatcaaaaatcagggaatcagaatctccctgcccgccatccagcaggttccaggttgccccttcacctttaatggtgaaggtgttcttcccggtaccggcagtaacctgatcaacatgagtcttaccattgagtgttacattattattgccatttcctgcagtcacttctcctgtcagtgtgctgccatcatcaaataaaaatgtattgttaccctctttcgcactgacggttccggtaatactgcctttattggtgaatgtgttatcaccgccgttcagagccacaaccccctgaatttcagcaccgctgtcattcagtacggtggtattcacggcgtcatcaaacgccattgcagtcccggtggtggacgcagctttaatctgacctttattggtaaaggattgtgcttttgaagcatccactacggcatgactcagagaagcagagatgagattaccgctctgaaccacttcactggctgcattgttaaccaccagagcggaaccgccatcggcctgtataacattgacacttgcaccactcttcacgacagcaccatctttagtgttggcgaaaatacccgtgccgtccgtacccttcaggttaatgaccaatccagcggagtcagacatatccaggttattatcggtttcacttccgtcagctttctggaacgccagtgcaattccactgccgtctacattaatagtgccgctgttggtcttggccagggaggcagaagtacgtacaccaatgccatcagccacattaatttcagtcgtattggttaactgaatgccttcaatttctgcgcggttctcaatcccgtgaccgaccgcacctgcagcattaacattgattttcgcaccatcaataaccagccccacagcccctgtatccagcaggatgccatgcgcatttttctgaccttcgatcgtacccaagccactccctgccaggttcagtgacgcgcccgcccccagcttaatggcagcctcaccatccacagcgacgatatcccctcctgtgctggtaatctgagactgtgcaccttcaacaaataatgcaacgccattgaccgcaatacggcttcctgtattttcaaagcggccgttatcaacccagacgccgatattatctgtaccggtagtgaaatcaatgttgccgttgttaatcaacagtccctgattacgcgtaataaagcccttggcattattcagcggcgaagagatatctgcctcattggtaataaccgagccagtattcgtttgtgtaatactgccatccagagcgtattcatttccgtcaacttccgcgacaacagcgccatcccctacaaggttaactgatgccccctgtttcagcgtcgctgtcgcaccaccagttacatataatccctgagcctgagcgcccaggatctggaaatcactgccagcatcagccaggacattgctccctttccctgtggcccagataccacggctgcctgtcccggaggttttcatcagcagagagccggcctgttttgccccatcttcaatacggaaaagtacagaacgttccccactggcatccagcagagttcccggtgcaatattcgtcttaatggttgcaccatctccgataatacgaaaagcaatctgatcggtaataccagagccgtcagcagcaaagttcggtactgccgaaccatcaaggttaacagtccctttattgctggcctcaacgccaatcgccccctgtccctgcaaagatatagtacccgcggtcatattaaccgttgttgttgtaccagatgcttttatacccgttgtacggttagcattatctcctcccttgagaacgagatttcccgagttattaatcgttgtaacatcttgtgtggcattagcaattagtcccacaccaccatcctgaactgtaatatttccgctgttggtaccaacagccccctcctcaacccggacgcccactgtattctttccagtaaagatgatattaccggtattatttagagtggccccattacgggcgatatacccggtcactttatcctgggtggaacttaactgagcccccgccgttaatagtgtggtcttgtccttcggattaatgagtttgccggaaatatcatagccattgccatccgcaataccggctatcgcactggcattatccatattgataatggcattactttcaattgtgccctgcgctcccccttcaattaaagtcgctgtagccccctcacccgtcaggttgatggtcattcctccagacgttactgtcgaggccacaccgccatccgatttccccgtggcaataagtgcataagagttcttaccagacgccgtaagtgcagaagaagcatctgcagttccctggaatgtcgcaccactggcaatacggaataatgttgagttttcagtggacacatccataacaccgcttccggtattatgaatggcagagtcctttccatagacataaaagcctatctgatcgctgctgccaaatagcactgcaccattgcctgacagggtcagactgccgccatctttagcaaaaacccccacagcccccgtaccggcaagactgatttttccggatacattaacattgcttccggcaccttccacccaggcaccatagttacggaaaccactactgatacccttgccgccaacatttatcgtaccgtcagaattcaactgtcctgcattgattacctgtagcccggtgctgttcagaccattaacattgataatcccggagtttttcatcccggagctattatttgccagcatgccaacattcagtgcaggtgcatcactgtcatgaccgtcaatagtgatagtccctttatttaccacatcaacagtcccggcatcctttgccaggattccgtagttcccctgagcccccctgcccaaaaaaatagtaccttcattaacgactttgtttgcaccattttgtacttcaatcgcaacagaacccacagccgaatgagtcgcagttttatcctccgcaatacctacattgatgctcccgaaggccgagttaataaaagagcctccagctccaacatttacacctcgtgttttgccattattatcattagttgatgcatcggcagtaatatttattgtgcctttatttgttgccatgcccccattactaacaacaattgcggtgttaatcccctctggagcgaaagcatttttaaatgggcgaatattaataacaccattattaatggctgaagaaccattactaccggcaaccatcccctctgcctggagagcatatttatcattattatcccaaacaaaaagtgtaccatcgttaacaatggtactgtcttgataggcaatcatttcagtaccaatggcatcaatgaccccttcattaacaccggtcccaccattagttgcaacgatccctcctccattcccataggcaggaagaactccagttaatttacccgttttacctaatattgctcgtgcgttattggttgcatggagaacagcaagcagccctacattttctttgtaaggagttgagtctatacgtcccccagcggtcatatccacattgtaattatgcttggtgacaataagggccttattaaattcagcatcatactgcttataagaaagcgttttgtcctctagtgactttatcaaatattgattatattgctttaaatcatcaagagagttaatatggtgtacttttcccgcccaatcagtaattgttccagcatatttcattgagtcaatgattttttgagtaacgccgcccccctgcatggttgcaccaggctgaaaataaaaatcattgaccgagttccatacaacagaggaaccttctccatcagctacagcaagctgtgtatttttaaaaaaattaccgattgctggtgaacccacatccaaaatagctgtaccgccattattggctgttacaaaacgtgtcgcattgaaaaaatccgcagtgccactaaaaccaggaatggtttcatttcccccagtccccgcatcgcgttgtgagaaagagtcagtatcaaacacttgaagtgtttgagaagcgccagtaacctcatccttcactgtaatggtttttgttttttctccggtattgacgtaaatcaatccggataaattatctccagtggtgtagccatttaaaattgcctgttctacagtcatccagataagacctgacccaccagactggacgacatttggaccagtgatgtattcggttttaccacttactgttgcagccccaacacccgagttattcgtacccggacgccagtctggtgacaatatgacatctgccattgcgttattgcaattaattgcaatagcgccccccagaaccattgctgataaagcaattcctaagcgagttgatttacatttttttctacaactcgtcaattctgaaacaacatcccatttttgggttgtatggttccaaatgactttatatactttattcataacactaatactcttgaacgcacattataattgaatattttcactaataagggaacacggaatatttataaattgatgtaaacgttttaccccgagtttatccatagctctacgacgatgcgtccacacagtcttactggatatacccaaggtgttcgagatccatgcaatatcttttccttccttggtatatataaagatacttttctccctcggggataattgtcgttctaaaaaagaaactttatgattcgcgcgaatattttttttgcacctccagccattgataaatttatctatatagaaacaaaattgctctgctgttaatttccacggtatgaaaggtatgcctttattactaactacaccattatccccccatgccaggcacggaatattgacaggctggctttttagccattggtgaatgaaatacagtgagcgtatacaggtagtagaatcattatcagggaatacaggtaacaacaacgattgctcatcccgaaagcaagatgtgccaaaatcacgaatcagagaagaatagtcgtccacagcgatgactttcacgtacgaaaaaccccgccaacgcatactcttaattgcttgaattataaaagtattttttgtagtcgtaatcaaaaccatgcaatcaatttcctgttatcccctttcccaatttccttttgctttgcacaccggggggagacaaaccttgaggcacaggtttacaaaatgacccattttgacaacatcaatttaattaactacaaatagcacaaaacgcaggtaaaaaacctgcgtatttattttaattcagaatataattttgattgttatttacattttggctttatacgccagagattaaaaagaagacaaacctacctctttatgtgtagattgacgccgcacattgatctaaatcagtaaatttaatgttttttatagaaaaaaatgtttttctatacgagaatttctaaacaaagattgggtttacattttgggtcaaaatgttgcttttttgcgtcacctatcccccacattttttcaaatctcattgaattagaagcagtataaattaccgtatgcctgatattacgatgcccgagatagtcctgaataagacgggtatccacaccattatctgctagtgaataaccacatgcatggcgtaacatatgtggatgaactttaatatttaaacctgcatttttacccgcagcagaaactatgttataaaatcgttgtctcgataatggttttcctgttcgggaaacaaataaccacgggttatcattgaaatgtttaacatttaatgaattcctttcattcagccagtttgttattgcaatcacctcttccttttgaagtggatggactgtactgaatccattttttatccgttgaatatatattttttctgtagttagttctaaatccgacaactgcagagataagagctcactaacacgcagaccatgaaaataagccaataaaatcatgcaaacatcgcgtgaagagcaactcttttgttttacagattgaagtagtaaattaatttcatgatgcgttaaaaattttctgttttgcataaatcacctctatttatatgaaatagccatgtcaactatgatgaaagaattacatttagtcaataatataattcatatagttgctgtatgattatagattaatttattaaaattcacctaatctaattaatcgcttgtaaacgcatataaacaaccttcgttatgtaactatcgttcaaaactctcttgtaaatataaagagccctataagatgattataaaaaagtcctacaacccgaaatagcattccctcataaaattaagctcaacatcggcatatttaaaaagtatccaatgcaattaatattttatctaaaattaacattgtatcttgtatatattacatccatgaatgtatggatttttttatttaaaaattaatgcactataacaaaaaacatcaccaagtgttaaaactaacacaacaattaaccaaaataatatggctgtttatttttcatccgtaaacaaaaaggtacaaatattttcaccacaaaaaaaccaccagcatggcattgaattaccattcacaatacacacctcctttcgcttatttatgctcattggttgactaataatgatctataccccctgggcaactatctctctggcggggtattgatgaatatccatttagtggcataatttaaaccccagctcattatttgcttataaaaacaagcaataataccaggctctggtatttatagtttattttttaacttaattaatataaccgataatattatgcgcaaatttattactcatagtgaatggttgttattttttgaagccatcaacggttcaaaaaatgaaattagagataaagccatgttacaaatggcatatgtacatggtcttagggtaagcgagcttattgcactaaagattagcgacattgacttttcagagtcagcaatatatatcaagcgtttaaaaaatggattatccacagtacatcccctgcaaaaagaaactgttctgttattaaaaaaatggctagcactacgtgataacatagtaaaaaaaccttttgaagactctttgtttctttcttgtcaaggaaataaaatctcgagacaatatgtgtataagatgtgtaagaaatatagtcacaatatgaatattaatattcatcctcacatgcttaggcatggttgtgggtatgctttagctaatcaagggttagacaccagactaatacaagattatttagggcacagaaatatacatcatacggtattatatacagccagtaatgcagcaagatttaaacgagtatgggagggtgatgtgttagatataaagaagatataacccctgttctaaaggcctcaattcattgaggcttttagcccctcatttttatgacatacaactgataatcataatggatctcaatattaatcaaaatgagaaataaatcacctttttattaaaaaattaatttttttaaagtcacaaaccaacacatataatatttaataaaaatgccaccagcaaatatattgccacttatcttttctctggtaatctagtttactataaattatcgctctccaatattcgacgccaagaagaagtggttattttatttatccttttcgtaactattgacaaaacaattcccatataaaaattgcaatttataaagccaacatacacttacagtgcataataaggttatttaggaaccagatgatttaatgtattataaggtataacattcatattgacttacctgttctcttaaccaagtaataaatgcctcaatttttggccactgcctgcccggtaatgtggtgatgtaataatgctgatggcatttcaccgtcatatcgccaaacggcgcgacgagctcaccactggcaagccttttttgtaccatacgtttccttcccatcgccaccccaatatgattcatcgcggcgataacggctaaatcagagcgatcaaagccaattccagaagatgttggcaaattaaccgcataatgttgcgcccaactatgccattcatccgtaccggagtcgttgctccatgcctgtctgtcatggagcaacgtacagtgacgcaggttaattaccgtgttggttaaatcatgtctttgagcgtactccgggctgcaaactggcaagatttcttcatccatcagaaagtgatgagccaattgcgctgacggcgcatcatcaaagtagatcgccaaatcgattccggcacgttgcaaattgacattgtcattaccagtgagcacggtgagcgaaatagacggatatcggcgtgtaaagtcacctaatgcgggcaccaaccagcattgggcgatagagggccgggaatacagcgttaacgttcccgataactcctgatttttgatatccagaatttcctgattcagggtatccagcgacgattttagcgcccaataaacacgtttcccctcgtgcgttaattccactttgcgatgggaacgaacaaacaactgaatacctaattcttcttccagctgattgatacggtgacttaccgcactggggctcagcgacaattcctctgccgcgagagcgaaggactgatgcctggcagccacttcaaaagtatgcagttttgatagttgccagccgttaagcagtcgatttcttatttcacgaaggggttccataatcacctcatttttctcttaagtgtaaaaaaatagcggcaaaatttcagctgtaaggtgagctaaagtgaaccatatctcaattcaccttcatttttagatgtaaatcactcccttgatgcaatttagctcatgtgaaaggcaaattttatcgtttgtcagcctgcgttgtttttttgtccaatatcatcaggttaatcacaggggaaggtgagatatgcactctcaaatctgggttgtgagcacgctgcttatcagcatcgtgttaattgtactgaccatcgtgaagttcaaattccacccgtttctggcgctgttgctggccagcttcttcgtgggaacgatgatgggcatggggccactggatatggtaaatgctattgaaagtggaattggcggaacgctggggttcctcgctgcggttatcggccttggcacgatactgggaaaaatgatggaagtatccggggccgcagaaagaattggtctgacacttcaacgctgccggtggctttcagctgatgtcattatggtgctggttggcctgatttgcggcatcacgctgtttgttgaagtgggcgtcgtgctattgattcctctggctttttcaattgccaaaaaaaccaatacctcattgttaaagctggccattccgctgtgtaccgcattgatggcagtgcactgcgtggttcccccacatccggctgctttatatgttgccaataagctgggcgcagatatcggttcggtgatcgtctacggtttgctggttgggctgatggcatcactgatcggtggcccacttttccttaaatttctgggtcaacgactgccctttaaacctgtacccacagagtttgccgatctcaaagttcgcgatgaaaaaacactaccgtcattaggcgcaacgttattcaccgtactgctacccattgcgctgatgttggttaaaacgattgccgaattgaatatggcacgtgagagtggtttgtataccttgcttgagtttattggcaaccctatcactgccacgtttatcgccgtgtttgtcgcctattatgtgttgggtatacgtcagcatatgagcatggggacgatgctcacacatacggaaaatggtttcggttctattgctaatattttgctgattatcggggccggaggcgcattcaacgccattttaaaaagcagcagtctcgctgatacgctggcagttattctctccaatatgcatatgcacccgattcttctggcctggttggtggcacttattctgcatgctgcagtgggctccgctacggtggcaatgatgggggcaacggcaattgttgcacccatgctgccgctgtatcccgacatcagcccggaaattattgcgattgctatcggttccggtgcgattggctgcacgatcgttacggactcacttttctggctggtgaagcaatattgcggcgctacgctcaatgaaacatttaaatactatacgacagcgacatttatcgcttcagtcatcgctctggcgggcacattcctgctgtcatttatcatctaagcgcaaagagacgtactatggaaaacgctaaaatgaattcgctcatcgcccagtatccgttggtagaggatctggttgctcttaaagaaaccacctggtttaatcctggcacgacctcattggcagaaggtttaccttatgttggcctgaccgaacaggatgttcaggacgcccatgcgcgcctgtctcgttttgcgccgtatctggcaaaagcatttcctgaaacggctgccgcgggggggattattgaatcagaactggttgctattcctgctatgcaaaaacggctggaaaaggaatatcaacaaccgatcgccgggcaattgctactaaaaaaagacagccatttgccgatttccggctccataaaagcacgtggcgggatttatgaagtcctggcccatgctgaaaaactggctctggaagcgggtttgctgacacttgaggatgattacagcaaactgctttccccggagtttaaacagttctttagccaatacagtattgctgtgggatcaaccggaaatctggggttatcaattggtattatgagcgcccgcatcggctttaaagtaacggtgcatatgtctgctgatgcccgcgcctggaaaaaagcgaaactgcgcagtcatggcgttactgtcgtggaatacgagcaagattatggtgttgccgtcgaggaaggacgtaaagccgcgcagtctgacccgaactgtttctttattgatgacgaaaattcccgcacgttgttccttggatattccgtcgcaggccagcgtcttaaggcgcaatttgctcagcaaggtcgcatcgtcgatgctgataaccctctgtttgtctatctgccgtgtggtgttggcggtggtcctggtggcgtcgcattcggacttaaactggcgtttggcgatcatgttcactgcttttttgccgaaccaacacactccccgtgtatgttattaggcgtccataccggattacacgatcagatttctgttcaggatattggcatcgacaaccttaccgctgccgatggccttgcagttggtcgcgcatcgggctttgtcgggcgggcaatggagcgtctgctggatggtttctatacccttagcgatcaaaccatgtatgacatgcttggctggctggcgcaggaagaaggtattcgtcttgaaccatcggcactggcgggtatggccgggtctcagcgcgtgtgcgcatcagtaagttaccaacagatgcacggtttcagcgccgaacaactgcgtaatgccactcatctggtgtgggcgacgggaggtggaatggtgccggaagaagagatgaatcaatatctggcaaaaggccgttaataacgtttcaacgcagcatcgccatcctttccctgggtgagcgatgctgccgatgacgcagacttaagattctgccgttttacctgctatagcctcctctttttccatcacccaacgcctttcgctgtaaacggcggtttcgcaaaccaaaccaaaaccgtaagtaagataaaagcaatagccgccatacggaaaatctcatttgcagaaatagaaagtgactgctgagttatttcattattaatttcattaagaactcctgaaagcgaaccatagtatttatccataatttgtgacgatgaattaaacacggggttaaattgatcgatggttgctgtcaactgactatggtgtaacgattcgcggcgtccccacagtgtcattgtcaacgacgtaccaactgatcctgacaaggtgcgaaaaaaattactcatactcgaggcattggcaaatttattatctggcaagcctgaaaacgaaatcgttgttaagggtaaaaagaaacaggcaacggcgaatccctgaaaaaactgtggcaaaatgatgcctgtaaaatcaatcgttggcataaatgtcacagaacgccagtaatagcaaaccgcatacatcaaaaaactaaatgtcaccaacaaccgcatatcaattttgttgccataacgtcctatcaaaggtgatattaatagcggcatgataccgatgggcgcataggcaagtccggcccatatcgcattataccccatcgtttcctggagtaactgcggcataagaactatcgctccagagtaaaataaatacgcgcatgtgatactcacaataccaatggtgaaattacgggacttaaacaaactgaggtcaagaatcggattctctgaggtcgactcccaaatgactaaagagatcagagaaataactgatactactgttagtagtattattgtactcgagttgaaccaatccagatcgcgccctttatcaagcataatttgcaagccaccaacaccgagcactaacagggtcagtcctggtagattcattttgaccggtgaagtctcagtttctcttcctttaagtaaggttaagcataatgtcaggacgataatccccatagggacattgattaaaaatatccaaccccagctaaagttatcgcaaatatagccgcccaatatcggcccacatatcggagcgataatcacggtcattgaccataatgccagagcaaatgttcttttttctggtggataattccttaataataaactctgtgacagtggaattaacggccccgccattaacccctgaacgactctaaaaaatatcagcacatctagattggtcgataaactacacattaatgaagacagcgaaaaaaaggttactgaaagtaaaaataaccttaattcgcctattctttgtgccagcctgccggtaacagggatcgcaatggcatttgctacgccaaacgaggtgataacccaggtgccttcgtctgttgatgctcccagaaagccagatattgtcggtattgcgacgttagaaatagtggaatccaacatttgcataaacgtcgctaatgacaatgcaatagtgacgcaccataacgtcccaccggttaatggtgcaggagttgatttagtgattgccattaaagttgtccattatgcgaaataatgttgctaatttctttttctatcggactggtatcgataactaaagccttactggtataagcaggcatggacgtcacggttgaagccagatcgggcatctcggcaatgtcttcattcttcgtatcaatagttgcagtcatcgataaaccaatgcgcaaagggtgttccatgagttcttttggatccagagaaacttcaaccggtacacgctgaacgattttgatccagttccctgtcgcattttgtgcaggtaataaggagaacgcattgccggttcccatattgatccctgtcacccgaccatgaaacacaacattttcaccataaagatcgctgataatattgaccgattgaccaatccgtacatccgtgagttgtgtttctttaaagttggcattaacccacatttgacgcgccggtacgacagccattaacgattgtccgggactcactgtttcgccgacctgaacacttctctgggcaatataaccggtaaccggactcttaatatccgtacgtttaagcgccaaccaggcttctttggttgcatctgcagcttcaatgacttgtggctgacggtttaatggtgtgttcattactaaagctttattcgctttataagcctggatagcagcattcaatgccgctttgctacttattaacgtatctttggtatgctccagcgcttcttttgaaataaccccttgcttcgctaaaggcacacgacggttataatcttctaaagattgttgatactgaatacgtgctgaagcgacttcggcactgtattgtttatcctgtaagtatagtttattcgtttgccgaacaatatttgccagattatttttagctttattgagtgcgatagtggcatcagttttatccagtgaaactaaaatgtcaccttgtcgaacgtagttcgtatctttatgattaacgacagtgacactgcctgagacttgtgcagaaattggatctgcatttcccgtgacataggcgtcatctgtactaatcatgtcttttaattccattgaccaataggcataggcacctgaaaacgcaataaataaaactaccgctaacaaagcaaaatattttcttctgtcagaatgttttttatttgaattaatctgttccactattatctctcatttcgcatagatgaaatttatgaattgaatgaaaagagtattcattcctcatatcaaacacagtgcatgttttgcacattatcccgggaacgttggagggctaatttaaatgaagtgcaaaaaaaacaacagaggactaaaccgcggcttttgcaatacaattcttacgcctgtaggattagtgagaaaacttatagtgctcatttgaaactataaatcatcggtatcatccctgattttattgttgacattttatttatgccgactatttatatggtatacttgtcgaattatcttaaaggaagctcaaattttcttatttttattgagaaaatgagatgataccttatgtctgtattactacaaggagaagggaaatgcttcattgcaaagggaataatctatgaacgcaataattattgatgaccatcctcttgctatcgcagcaattcgtaatttattgatcaaaaacgatattgaaatcttagcagagttgactgaaggcggaagcgccgttcagcgggtggaaacacttaagcctgatatcgtcatcattgatgtcgatatccccggagttaacggtatccaggtgttagaaacgctgagaaagcgccaatatagcggaattattattattgtctccgctaaaaatgaccatttttacgggaaacattgtgctgatgctggcgctaatggtttcgtgagtaaaaaagaaggcatgaacaatatcattgcggctattgaagctgcaaaaaatggctactgctatttccccttctctctcaaccggtttgttggaagtttaacgtccgaccagcaaaaactcgactccttatcaaaacaagaaattagtgtcatgcggtatattcttgatggcaaggataataatgacattgctgaaaaaatgttcatcagcaacaaaactgtcagcacttataaaagtcgcttgatggaaaaattagaatgcaaatcactgatggatctttacacattcgcacaacgtaacaaaatcggctaaccacatgaagtttttaccctatatttttcttctctgttgtggtctttggtcgaccataagcttcgcagacggagattacatcgaatatcgtggcatcagtagtaacaaccgtgtcacacttgatccactacgtctgagcaacaaggaattacgttggctcgcgagcaaaaaaaatcttgtgattgcagtacacaagtcccaaacagctacgttgttgcataccgattcgcagcaacggattcgtggtattaatgctgattatttaaatcttttaaaaagagcgttaaatatcaaattaacactccgggaatacgcagatcatcaaaaagcaatggacgcgctggaagacggtgaagttgatatagtgttatcacatttagttgcttcgccgcctcttaatgatgacattgctgcaactaatcctctgataattacctttccggcgctggtcactacccttcacgattcaatgcgaccgcttacctcatcaaaaccagtaaatattgctcgagtagcaaattatcccccagacgaggtaattcatcaatcatttccaaaagcaacaattatctcttttacaaatttatatcaggcattagcatccgtctcagccggacagaatgattactttattggtagtaacatcattaccagcagtatgatttcccgttattttactcactccttaaatgtagtgaagtattataactcaccgcgtcaatataactttttattaaccagaaaagattcaatcgttcttaatgaagtactcaatcgatttgttgatgctttaacaaatgaagttcgctatgaagtatcacaaaattggcttgatacaggaaacctggcctttctgaacaaaccattagaactcactgaacatgaaaaacagtggattaagcagcatcccgatttaaaggtgctggaaaatccttactcgccaccctattctatgacagatgaaactggctcagttcggggcgtgatgggtgatattcttaatattattaccttgcaaacaggtttaaatttttctccgatcaccgtttcacataatattcatgctgggacacagcttaaccccggtggatgggatatattgcccgccgctatttatagtgaagatcgagaaaataatgtttcatttgctgaagtcttcataacaacgccttacgtttttgtcatgcaaaaagcgcctgacagtgaacaaacattaaaaaaaggaatgaaagttgccattccatattattatgagcttcattcgcaattaaaagagatgtatccggaggtagagtggataaaagtcgataacgccagcgctgcatttcacaaggtcaaggaaggtgaacttgatgctctggtcgcgacacagttaaattcgcgttacatgatcgaccattactatcctaatgaactttatcattttcttattcccggcgttcagaatgcatcactttcgtttgcttttcctcgcggagaaccggaacttaaggatattattaataaagcactgaatgcaattcccccaagcgaagttctgcgcctgaccgaaaaatggattaaaatgcccaatgtgaccattgacacatgggacctctatagcgagcaattttatattgttacgacattatccgttttattagttggcagtagccttttatggggattctacctgttacgctcagttcgtcgtcgtaaagttattcagggtgatttagaaaaccaaatatcattccggaaagcgctctcggattccttaccgaatccaacttatgttgtaaactggcaaggtaatgtcattagtcacaatagtgcatttgaacattatttcactgctgattactataaaaatgcaatgttaccattagaaaatagtgaatccccctttaaagatgttttttctaatacgcatgaagtcacagcagaaacgaaagaaaaccgaacaatatacacacaggtatttgaaattgataatggcatcgagaaaagatgcattaatcactggcataccttatgtaatctgccagcaagcgaacatgctgtttatatttgtggttggcaagatattaccgagacgcgtgatttaattcatgcactcgaagtagagagaaataaagcgatcaatgcaactgtcgcaaaaagccagtttctggcaacaatgagtcacgaaataagaacaccaataagctccattatgggcttcctggaactactgtcgggttctggtcttagcaaggaacaacgggtggaggcgatttcacttgcctacgccaccggacaatcactcctcggcttaattggtgaaatccttgatgtcgacaaaattgaatcgggtaactatcaacttcaaccacaatgggtcgatatccctactttagtccagaacacttgtcactctttcgctgcgattgctgcaagcaaatcgatcgcattaagttgcagcagtacgcttcctgaacgctacctggttaagatcgaccctcaggcatttaagcaggtcttatctaatttactgagtaatgctctcaaatttactaccgagggggcagtaaaaattacgacctccctgggtcacattgatgacaaccacgctgttatcaaaatgacgattatggattctggaagtggattatcgcaggaagaacaacaacaactgtttaaacgctatagccaaacaagtgcaggtcgtcagcaaacaggttctggtttaggcttaatgatctgcaaagaattaattaaaaacatgcagggcgatttgtcattagaaagtcatccaggcataggaacgatatttacgatcacaatcccggtagaaattacccaacaagtggcggctgtcgaggcaaaagcagaacaacctataacactacctgaaaagttgagcatattaatcgcggatgatcatccgaccaataggctattactcaaacgccagctaaatctattaggatatgatgttgatgaagccactgatggtgtgcaagcgctacacaaagtcagtatgcaacattatgatctgcttattactgacgttaatatgccgaatatggatggttttgagttgactcgcaaactccgtgagcaaaattcttccttacccatctgggggcttacagccaacgcacaggctaacgaacgtgaaaaagggttaaattgcggcatgaacttatgtttgttcaaaccgttgactctggatgtactgaaaacacatttaagtcagttacaccaggttgcgcatattgcacctcagtatcgccaccttgatatcgaggccctgaagaataatacggcgaatgatctacaactgatgcaggagattctcatgactttccagcatgaaacgcataaagatctacccgctgcgtttcatgcactagaagctggcgataacagaactttccatcagtgtattcatcgcatccacggtgcggctaacatcctgaatttgcaaaagttgattaatattagccaccagttagaaataacacctgtttcagatgacagtaagcctgaaattcttcagttgctgaactctgtaaaagaacacattgcagagctggaccaggagattactgttttctgtcagcaaaatgactaaatagcggctcccacaatgttcaaatgtgggagctatttaccagcacatcttacatttatgatgagaactcctggcgaatttgttccccatgctggtcgagcgttgccgctcccggcataacatgcgggtccgcgcagccgctgatttttatcggattacccggcatcattattcccccggcttcaatcaacatatttctcgcctgagtttgtggtaaattaatggcctcagccacacttaataacggcgcgacgggcacaccaacttcatgtattctggctaaccaaacttcagctacctgcgtttttaacgtccgctcaatatattctttaagaatagcctggttatgtacgcgtaaaatattgctgctaaatcggggatcattaaccagttccgtaagctccagtgcctggcataacgcagaaaaaagcttgtcattaccacaacaaatcgtaatcggcttatcctgagtatcgaaaacatcaaaaggtgccatgtagggatggcgatttcccaggcgttgtggtgacttcccagtcgcgatatatgccatcagtccatgctccagaaaactcagagtggcatcaaacatcgctatatcgacatgcgcccctctctggctcttttcgcggccataaagtgcactcactattccactgaataaataaacaccgccacagagatccgcaagagaggtaccaacgcgcactggcggagcatcagggtatcctgtttccatcattatcccgctcattgcctgaatgatggtatcgtaggcaggagcatcttttagcggaccggtatgtccgaaacctgacgatgaagcatatataaggcgcgggttgatttcttgtaacctttcccatgaaaacccgagtttttccattgtacctgggcgaaaattctcagctaatacatcagcttgtttaagcatatttataaatatacttttatcgtgatcattctttaaatcaagaaccacactctcttttccatgattaataaaactgtaatagagcgactgtccatccacatagggaccaaatgtgcgggtatcatcaccatgacccggcggctcaactttaattacccttgcacccatattacaaagaagttgagttccgaaaggcccattaaggacatgcgtcatatcgataactaataagccttcaaacggccctttgcattcattatttgtcatttgcttatgccttgaaaaaagccgaaggtgaaaagacacttcggcatttatgtaaaatcaataacatgattaattatgaaaccagtcgactgacataaatccacaaaggagccgtgacgacaaaacccagtacgctcacagccaatgacgctgtaccagtgcgggtgtagacattaaaccggctggcaataatgattccggagaatgccggcggtaatgcgcctgccagtaccatcatctgcaaatgttcgctattcaaatgacatgccatacctacgagaagcagcgccagtggcatcagaatcagcttcaggaaggtgttataagcaatttcggcactgaactcgaatttatgtgcagccagagtcaaccccgcagcgaataccgccacccctgagttagccttcgcaatcagattaaaggttgggtcccatgctgccggaatttttaccccaaccaacaccaggatcgttgccagaacaggtgcccatactactggctcctttgccgcagaaattaatgcgctcagattactattcttcttaccatccgctcctgaggaaggattcagcaaatacagaccaataggaatagtaattgcgttaacaataatagaaataattgctaccactaaacctgttgatacggaatcaccataaataggatcgagaactgcaaaccccaggaatccaatggtaggtgaacctgcaattaatgcacatactgctgcttctgcatgggtacgtttaaaaaatttgtagcaaccgaaccaggagaaaaagaaacatccgacaataaccacaagtgatacaagggtcaggcgagtgtccgcaaaaatcatttccctgtttgcccgggtaatagaaacaaatagagccgcaggaagagcgtagtttaataccagtttattaaatgcccgagcttgatcctctgaaaaagtttctcgtctgccgctaaaataacccaacagcatgattacgataataggcaataaatcgccaataaaaaatgttagcataatagtatttccgataagggtccccttaccatcgcataataagttggcaagaggagacgatgtcagtatttaattaccagcgacttgttttgggttaagtttggtaatatggccactttcagttcctgctgctgggtcgatgaccacattaataatggtcggtttgcgcgactgaattccggtggttaaagcatgacgaagttcatctgtcgtggtgacgttatagccaacgccacgaaacgcatccattaatttgtcataccttgcatggtgcaacagatccgttggcgatggtgcaccagcgccgctgaggtcaacaccgtctcctctgtagatgccgccattattaaaaataacgatcgtcaccggcaggttatatcgacaaatcgtttcaatctccatcccactgaaaccaaaagcactatcaccttcaatggcgacaaccggagaaccagaggtcacgctagcaccgatggcatagcccataccgatgcccatgacaccccaggtgccacaatccagacgacgacgtggtttatacatatcaataatatttcgtgcattatccagggtatttgccccttcattaactaaataaatatcctggttctcgcgcaaaacatcgcgcacggcacccaatgcattaaagtaatttaatggttgggtatctgtacttaacttttcatgcattttttgtgcattttgctgcttgtggatatttaaaatatcgcgccacaccagtggagtcgtgaatgtgttttgtttcaattctgccagcataccttgcatactggatgcaatatcgccaacgactggcacagcaatggggcggttgctgtcaatttcctgcggttcaatatccagttgaataaactgtgtatctgccgcccatccttttttaccgtgtgccagtaaccaattcagtcgtgcaccaacaagcatgacaacgtcagcatttgccagggcaaacgaacgcgcagctgccgcagaaagtggatgcgtatcttcgaggatccctttcgccatagacattggcaggaatggaatctgggcactttcaataaattcacgaagctgttcatcagattgtgaatacgccgcgcctttgccaagaataattaatggtcgttcagcttttgctaaaagcgaaattgcgctagtgactgacttcgggcatggcaataatgctggcgacggattttcaactttaacaatcgtggttaacgcttcgtctttttccatcgtcgcggccaggacatttgctggcaaatcaagataaacaccgccaggacgacccgatactgagacccggatagcgcgtgccaatgcaatgccaagatcctgcggctgattaacgcgaaatgctgctttggcatacggttttgccgcattcatttggtccagctcttcataatcaccttgctgtaggtcgacgatcgcgcggtcgctggagccgctaatcatgatcatcggaaaaccatttaccgttgcattggccaatgcggtcaaaccgttgaggaatcctggcgcagacactgtcaggcagatccctggtttttgggtaagaaaaccgcttgctgcagcggcatagcctgccgactgctcatgacgaaaaccaatataacgaatgccttccgcctgggcatggcgcgccatatccgtcacaggaatacctacaacaccataaatagtgtcaatattattctgttttaatgcttcaacgatgatatgcataccatctgtcatttgaagttgatctgacatgattaataacctcgaaatttttataaattgggagccagaagcccccgttaatatcagatggcgtggttttgcttcattgcagcaatttcatcgtcgctataacccagctcctgcaatacagcagcggtatgttcacctaatagcggcgcagctttaatatccggcgtaaaggcagagaatttcattggacaaccaactgtcagatattttccacgcaacggttgttccacttcgacaacactgccactttggcgcaaagagggatcaagtgaaatttctttcatacttaaaaccggtgcacaaggaatatcaaactgagtcaaataggccaccgcttcatgtttatcaatagtgacagtgtatttttcgatttcagcaaaaatatcgaaaatatgtggctgtcgggcatgggctgtactgtatgccggatcggtaatccattctggtttgccgatggctttacaggtgttttcccagttttgctcctgaatagtgaaataaatataggcgttaggatcggtttcccagcctttacatttcaggatccagccaggctgaccgccaccacccgcattaccaccgcggggaactgcatcaccaaatgtgccattcggatactgcgggtattcttccagataccccaacttatcgagacgctgctggtcgcgtaatttcacgcggcaaaggttcaacacggcatcctgcattgacatggtgactcgttgcccacgccccgttttttcgcgatgcagcaaagcagcaagtaaaccgatcagcaaatgcattccggtgttgctgtcacccaacgctgcagcgcttaccagcggcggaccgtcccaaaaacctgtagtagatgccgcgccacccgctgcctgagcaacgttttcataggcttttacattcacataaggcgaacactcatcaaaccctttgatcgaaccaaaaatcagacgtggattgatttcttgaatatgctcccaggtgaagcccatatgatcaatggcccctggatgaaagttctcgactaagatatcagcttcgcggatcagcttttccattacctctttgccttccgctgttttggtatttaattcaatagaacgtttgttactgttaagcatggtgaagtaaagcgcatcgatatcaggaatatctcgcagctggtggcgcgttacgtcaccaacgctgggacgttcaattttaatgacgtcagcgccaaaccaggccagcatttgagtacaagatgggccagattgcacaccggtgaaatcgagaactttaattccttgaagtggagttgacatagcaatacctattagttaattaaatatgtgttaatttagcgtttatttaaggcataacgcctctataaataatctgcaaaatatcgtcgtagctgcactcgatatttttaaattcctgtatcaagtgctgaaaatcatttcatcgctacttccaattcctttctgcatggtaagtagtgaggacgaaaagaagaatataataaatattggttcgcggtaatcagagagagccgcgacatttgtgatgttattcttacaactgtaagaagtgtcagtgatttacaagtaaggttatgattacactatttaaagcgtaccataaaatataacataataaatgatttgtgataatatgggattattgcggtttactttgaggaagataaaatgcgagtttatagaaccgcgagcgccaaataattttatgaccacaacctgtcgtattgtggtcataaaaaattgtcgactggagggagttaaatcctttacctcaatatattgcctgtcaggtttagttcacaaacagtgcttcgctatcaacgatgattccatcttccgcacctttaagcgccaggtttgcctcgtagtattgctttttatcaagcagtttctgcgcatcagcaagtgcattacgagtctgtttaagcggcatcaaatattggttttccattacaccaacaccggccaggcgaagctcttccattgcaccctttttatcccctttcgccattttttcgttggcaatttttatcgcggcttctttttcgggtgtcgctacataactttcagaaattccgacagatgcattaatgacaatatattggtcatcattgacgttggtctttttacctggcttagcgaactttgcccattcggtactatcatctgacagcaaagcggaagcttcattggtcagttcttttgccttttccggatcgccatgaaacagagccaggcgcgctacctgcacgtcacgcatcgcatataaaccttgttcagagatacgctctgctgctgccgttttctgggtttgcttaacttgctgagtttgctgttgtgccgctaccggtgcattatcagcagcccatacagttgaagatgccagaattgctgtgaccatcgtagccataattaaacgtttcatacttacctcattctttaacagttttagaaaacgccgccatcatattgggtgagaatgaaatgagaaatcagagagcaacggacattttgaaagggttatcttacaactgtagttattatcgcaaagccgcttttagtcttacagttgtaggaatctgcttcctgtcgcagagaactattcttatataccacaaagatatgtcatttattatatcgatgtaaatactgattaattaaatataaatacagccataacatcgtaggttttcagtgaaccattttcaggatattttctatgaaagtaaacttaatgctttttagcttatttttatttgtctctattatggcatgcaatgtttttgcattttctatttctggtggtggtagtgaggcgagctataaagagacagaaaaaacgtcagtgatgacgacaacgcattctacaaaacttcagccatcacaggcgattttgtttaagatgagagaagatgcaccaccattaaacctcacagaagacatcacgcctacttatccgacaaaggcgaattatctcattcatcctttgcgatagcgtctgtcacctggcaggtgaacaatcatgtctgatgctgatgtgaacacctgcccaaatgagccatcctgacccactatcgcctgccataccccaccataaagcgaatcatcaagccacaagccggggcaagaaacataaatatccccgtcaccagttcattaccgccagttaaccacatggtgaagtaataaatgagtgcagcgaggatcaccatgccgaagaaagaagagatcgccgataccatgttcagtacctgaccgatgtatccgcttacgcagacaatacacagggcgagaaacatccataaataaatcatagctcaacctcctgccgcgctaaaaaacctgtaacttcagtcactttaatagtaagacaatccttaacctctggcaatttttgctaagcatcaatgaaaacagcatgttaaatgcaagactgttgtgtacggaaaaatatttactttgcacgattaataatcagtagctgaaagcagtcagcgagtgataaagtacagataccgcattcatgctcctcgtggttatgtcctgactagtctttacactctttacaggaaccattgtcgtacatgatggcctaatcaattgagtgtaccgctgtcgacatggaatcttctgcgatacaacaattcgtatctacagaaggtaactatgtttccaaaatgcaaattttcccgcgagtttctgcatcctcgctactggctcacgtggtttgggcttggtgtactctggctttgggtacagcttccttatcctgttctctgctttctcggcacgcgtatcggcacaatggcgcgaccattcctgaaacgtcgtgaatctatcgcccgtaaaaacctggaactttgtttcccgcagcattctgcgaaagagcgcgagaagatgattgccgaaaactttcgttcactcggcatggcgctggtagaaaccggcatggcgtggttctggcccgacagtcgcgtacgtaaatggtttgatgtggaagggctggataaccttaaacgcgcacaaatgcaaaatcgcggcgtaatggttgtcggcgtccattttatgtcgctggaactgggcggtcgggtgatgggactttgccaaccaatgatggccacctatcgcccgcataataatcagctgatggaatgggtgcagacccgtggtcgcatgcgctctaacaaagcgatgatcggcagaaataatctgcgcggcattgtcagtgcactgaagaaaggtgaagcggtatggtttgctcccgatcaggattatggtcgtaaaggcagctccttcgcgccgttctttgcggtggaaaatgtcgccacaaccaatggcacctatgtcctctctcgtctctctggcgcagccatgttgaccgtaacgatggtaagaaaagcggattacagcggatatcgtttgtacatcaccccagagatggaaggctacccgacagatgaaaatcaagccgctgcctatatgaacaagattatcgagaaagagatcatgcgcgcaccggagcagtacctctggatccaccgtcgctttaaaacgcgcccggtgggtgaatcgtcgttatacatttaacaaacggctctcactctttccctcctcaaatcagccataataacctcatggtttttatggcttttttcttaaggttttttccttcgctgaatatctaattattaccgtcagaaattaaactgtcgccgatatgagacacctgtaagttactaaaagtaaataagaaaatgcctcttgtctcgtttcagttttaggcgtacattagcgccgtctcgagcagtttagctcagaattctgggatgatgcccacggtaaaatacaggacgtttaaggtcgttttgcccggtgtcaactcactgtatcaggtgtaataaagtcattcaggcgtaacagtagttacgcggagagatgtaaagtgaaatatttctttatgggcatttcttttatggtcatcgtttgggccggtacttttgccctgatgatctaaaagcaaactgtgcaatgaaaaacaggagccatctggctcctgtttgcatttctgacgatggtgtttattccgcgttttcgtgaatatgtttgctgctggcaggtagtaaaccgtcggcacggaacatcgctttaatcccacgaatcgcctgacgaatacggtcgcggttttcaatcagtgcaaagcgcacatgcgtatcgccgtagtcgccaaagccaatccctggagagacacagaccttcgcttcgttaagcaatttcttggcaaattccagcgagcccatggcagcatacggttccgggattttcgcccagacatacatcgaagccttcggcatttcgaccatccagcccgcttcatgcagccctttcaccagcacatcacggcggcgtttgtactgttcggcaatatcgcgcacgcactgttgatcgccctccagcgccgcaatagccgccacctgcaacggcgtaaaggtgccgtaatcgtgatagcttttaatacgtgccaacgcgctgaccagcgttttgttaccgaccataaagccgatacgccagcccgccatgttgtagcttttcgacagcgtaaagaactcgaccgccatgtcgcgtgcacctggcacctgcatgattgacggcgctttccagccatcgtagacgatatcggcataggccaggtcgtggaccaccagcacatcgtagcgtttcgccagcgccacaaccttctcaaagaattccagttccacgcattgcgcggttgggtttgacgggaagccgaggatcatcatcttcggtttcggataactttcacgaatggcgcgctccagttcgttgaagaaatcgacaccttccaccagcggcactgagcgtacctgcgccccggcaatcaccgcgccgtaaatatgaatggggtagcttggattcggcaccagcactgtgtcaccatgatccagcgtcgccagcatcagatgcgccaggccctctttcgaaccaatagtgacgatggcttctgattccgggtcgatttcaacgtcgtagcgatcctgataccagcgggaaatggcgcgacgtaaccgcggaatgccgcgtgaagtggagtaaccatgcgtgtccgggcgctgggccaccgtacataatttttcgacgatatgcggcggagtcgcaccgtccgggttacccatactgaaatcgataatatcttcgccgcgccgacgcgcagccattttcagttcagcggtaatgttaaaaacgtagggcgggagacgatcaatgcgcgtaaagcgacgttcagggcgagtgtcagccataatttcctcagattaacgttagcgcccggaccgtccgagcgacgctgccacgatggtggctgttttgaaaatagcctgattaatttctgtctgtccagcgttttagaacatttttatcaatggctttaaatgaggaactccacttcaaaaacaggaaatttatctacgctaacaagaaaattaccattcattttattaacattataatttcaataaatttaccaaccagatgtgcattatcaagagatgcattgctaatacaccatttatctttcaatccccttttaaaattgtggtttttcctcaaaaacggcctgctggtcatcagccttcaggttacctatcatagaggtttaatccttattcagagtcacccgtgcacgaaatattcaacatgctgctggcggtcttcgatcgggcagcgttaatgcttatctgcctgttttttctcatccgtatccgcctgtttcgcgaactgttgcacaagtcggcacactcaccgaaagagctgctcgccgttaccgccattttctcgctgttcgccctgttcagcacctggtccggcgttcccgtagaaggctcgctggtgaacgtacgtattatcgcggtgatgtcaggcggaattctgtttggcccgtgggtgggcatcattaccggcgtgattgcgggtattcaccgttatttaattgacatcggcggcgtgacggcgatcccctgctttatcaccagcattctggcgggttgtatatcgggctggatcaacctgaaaatccccaaagcacagcgctggcgcgtcggtattctcggcggcatgttgtgtgaaacgttgaccatgattctggtgattgtctgggcaccaactaccgcattggggatcgatatcgtctctaaaatcgggattccaatgatcctcggtagcgtctgtatcggctttattgtgctgctggtgcaaagcgttgagggcgaaaaagaggccagcgccgcgcggcaggccaagctggcgctggatatcgccaacaaaacgctaccgctgtttcgccatgtcaatagcgagtcattacgcaaagtttgtgaaattattcgcgatgatattcacgccgatgcggtggcgatgactaatactgatcatgtgctggcctatgtcggcgtgggtgaacacaactatcagaatggcgatgacttcattagcccgactacccgacaggcgatgaattacggaaaaatcatcattaaaaacaatgatgaagcccaccgcacaccagagattcattccatgctggtgatcccattgtgggagaaaggcgttgtgaccggaacgctgaaaatttactactgccacgcgcatcagataacctcgtcattacaggaaatggcggtcggtctgtcacaaatcatctccacgcaactggaggtgtcacgcgccgagcagctgcgtgaaatggcaaataaggcagagcttcgcgccctgcaaagcaaaattaatccccatttcctgtttaacgctttgaacgctatttcatcgtcaatccgcctgaatccggatactgctcgccagctgatctttaatctgtcgcgttatctgcgctataacattgaattaaaagatgatgagcaaatcgatatcaaaaaagagctgtatcaaattaaagactatattgccattgagcaggcccgctttggcgacaagctgacggttatctatgatattgatgaagaggtgaattgctgcattcccagcctgctgatccagccgttggtggaaaacgccattgtccacggtatccagccttgcaaaggtaaaggcgttgtcaccatcagcgttgcagagtgcggtaatcgggtacgtattgcggtgcgagataccgggcacggcatcgatccaaaggtgattgagcgggtcgaagcgaacgaaatgccgggcaataaaattggcctgctgaatgtccatcatcgcgtgaagttattgtatggcgaggggctgcatatccgccgcctggaaccaggaacggaaattgcgttttacattcctaaccaacgcaccccagtcgcctcacaggctaccttattgctttgagccggagtgatattgtgaaagtcatcattgttgaagacgaattcctggcacaacaggaactgagctggttaattaaagagcacagccagatggagattgtcggcacctttgacgacggtctggacgtgttgaagtttttgcagcataaccgcgtcgacgccatttttctggatatcaatattccgtcgctggacggtgtgttgctggcgcaaaacatcagccagttcgcccataaaccgtttattgtattcatcaccgcgtggaaagaacatgcggtggaagcatttgaactggaagcgtttgactacattctcaaaccgtatcaggagtcacgcattaccgggatgctgcaaaaactggaagcagcctggcaacaacagcagaccagcagtacgacacctgccgcgacggtaacgcgtgagaatgacaccattaatctggtgaaagatgagcgaatcatcgtcacgccaattaacgatatctattacgccgaagcgcacgagaaaatgacctttgtctatacgcggcgtgaatcctacgtaatgccgatgaacattaccgagtttttcagcaagctgccgccgtcgcattttttccgctgccatcgctcattttgtgtcaatctgaacaaaatacgcgaaatcgaaccgtggtttaataacacctacattctgcggctgaaagatctggattttgaagtgccggtcagccgcagcaaagttaaagaattccgccagttaatgcatctgtaatcgggaactttcatgaaagcaccaggcttgcccgccgatcaacaatttttcgccgatctgttcagcggcctggtgcttaacccgcaactccttgggcgcgtctggtttgccagccagcccgcctcattgccagtgggcagtttatgtattgattttccccgtctggatatcgtgctacgcggcgaatacggcaatctgctggaagcaaagcagcaacgtatggtggaaggagaaatgctgtttattccagcacgcgcggctaatttaccggtcaacaacaaaccggtgatgctgttaagcctggtgttcgcaccgacctggcttgggttatcgttttacgatagccgcaccacgtcgttgttacatcctgctcgccagatccagcttcccagcctgcaacgcggtgaaggtgaagcgatgcttaccgccctcacccatcttagccgttcgccactggagcagaatatcattcagccgctggtgttaagtttgctgcatctttgccgtaacgtggtgaatatgccgccgggcaattcgcaaccgcgcggcgattttctctatcacagcatttgtaactggattcaggataattatgcccagccgctcacccgcgagagcgtggcgcagttttttaatatcacgccaaatcatctgtcaaaactgtttgctcagcatggaacaatgcgttttatcgaatatgtgcgttgggtacgaatggcaaaagcgaggatgattttgcaaaaatatcatctgtcgattcatgaagtggcgcagcgttgcgggtttccggatagcgactatttttgtcgcgttttccggcgtcagtttggtctgacgccgggagagtatagcgcacgttttcagggctaacttcagaaggttaattccgtttccagcagcgtcagaatactttgtgcatcttgcgcggcaaacagcgactggcggaagtttttattcaccagtttacgcgccagctgcgagaagactttcacatgattcatcccttcgttagcgcccagcgtcagcatgatcaccagttcgacttcgcccatttctgactgccagtcaaccggtttcaccaaccgggcaatgctgatactggaatgacggatccactgtgatttggtgtgcgggatcgccacgccaaaaccaacgccagtagtaacaatctcttcccgctgccagacatcttcttccagctcgaacggatgttcagtacgcccgttaacaccgaggttaccgcacaggaactggatcgcctgctctttattactaaaggactgatcaacaaagatattctctagtgccagcagtgggcgaacgtcttcttccggcgtaaacgcggtaagtaacgcttcaatttcctgcgcgctgcggcactcgcacgcctgacgcgccagttcccgacacgcctcgctatccagttgacgaagctggcttttcactgccggaatacgcgggctactcatgcttagctcatccaggcccagccctagcagtagcggcagataacgactttcaccgcccagttcaccgcaaatacctacccatttgccgcgctgatgcgcagcggtaacaatctgctgcaacatgcgcaggaacgatggcgtaatcgggttatacagcggcgatacgcgcgggttattacgatcgactgcatacagatactgggtcatatcgttagaaccgatactgaagaaatcgacctcatcgcagaagtggtcgatgatgtagcacaccgacggcacttccaccatgatacccagcgtaatcgtctctgcatgacgcaggccatcgcgcttaagctcaacgatcgctttttggagctcacccttcacccataagatctgatcgagactgtggaccattgggatcatcaactgggcgttgccgaaactggcagcgcgcaaaatcgcccgcaattgagtgcggaacaggccagcaaattccgggtaaatacgtaccgcgcgatagccgaggaacgggttctcttcctggggaatgttgaggtaaggaatgcttttatcgccaccgatgtccatcgtgcggaagataatcggcttgtcgcccgccgccagtagcacctgctggtacgcttcaaactgttcctgctcgtccggcgcgctgtcgcgatccatatagagcatttcggtacgaaacagcccaacgccttccgcgccgttggcaaacgcgcctggggcttccagagctgtgccaatattcgccgcaatatcaatacgctttttatcacgggaataggccagctgcgcggcagcttgcgcctgttgtttttggcgtttatccgccagcgtctgcgccacctggtaataaccgctcaccgcatcgttgggattaattgccagtacgccgcactgggcatcaagcactgcaggttgcccggcataacgggcaatcgcatccagcggcaggccgctcagtaccgggatcgccgaagcgcgggccagaatcagggtatgcgaggtgcgcccggttttctccagaatcatgcccgcaagattttttaaatcgaggctcaaaaactggcttggggttaaatcttcagccaccagaatggtcggtttttcaagcaccagattattgcgcggttttagttccggccaggtgatatgcagcaactgttcgctgatatcgcgaatgtcgctgacccgctcgcgcagataatcgctggcagaagcagaaagtttggcacaaatctgctccatattgctgatgatcgccgcccccagcccctgatgctgttctgccatcaggtgacggatattgcctgcaaattcatcatcctgaatcagcgacaaatgggcgctgaggatagttttgctttcgccgtcacgctcacgcaattgctggttcagttgctcggcaagcgttgccagactgtgctccagtagggtggaatcttgcgcactcgcagggatcacccgataactgtcgaggctgtcgctctgtaacagggtcagtgtacccacgccaacgccgcttgccagcacgttgccgtacagtaaatccgggttcaggcggcttaatgaacgcggcagcggatgcgccgtcagttctgccagcgtcggctggacgctatcgctgtcgataaagcgcacctggatatactcttccagcactcgccgcgcctgctcttcatcgctaccgctaatgttcaggctgcaactgtcattaaataaagtgccagtgccaatcagcgccagcgagcttttcgcatcggcctttgcgttctggcgatggttaataaaagtgatttcgctttgccactggctgcactgctctttaagttcccacgccggacgagcatgtagaccgttaggcaaaggacagagaaattgaatcgttaacataaccgctccgggttaatcaggagatcatctgaaatccgtcagttgaacaaccgtctcacgcgtaagacgttgaataagggcagataaaagttgctccatctgcaaaatgtcacggcagtcggcaatcgatgcggcgcaatgtccgtggcgggttgcaggccccatcaccactgtgggtacgccagtgccggttaaatgcaccgccccgccgtccgttccgccgttgctgaacatatctgactgcaacggtacgccaatttctgccgccacggtttcgatccacgcggtaagttttggcggcgcaatcagtgacttgtcgcttaacaccagcatcggcccgttaccaatctggcgatggttagctgcgccataatcaaagtttttcgcccagcaggcagtatcaagcacaatggcgacatccggcgacaccgcgcgggtggcagtttgcccgccgcgtaatcccacctcttcgctggaacttgccaccagccacacttccgcaggcagttcggcgtcgtgcagctcacgcagtaacgtcaccagcagatagcaaccgaggcggtcatcaaaggctttccccatcactcgctggtgagggagaacctgaaaagtggtatcgaaggtgacgcgatcgcctggacgaattcccgcctgcatcacttcgtcacaggagcgcgcgccaatgtccacgcgcatggcgctgacgtcattcccctgccggtcgccgtcaagcaggcctggaattttgcactcttcacgggtagtgatacgcaccgactgaagctggcgggcagccatgcgtacattgccaaccggcaacacatcgatcgccccttcgcgggagatgctgcgcaccataaatcccacttcgtccatatgcgcacagatcatcaccttcggacctgtcgactcattgagtcggatcagcaccgatcccaggccgtcaaaacggacctctttttgctggcgatccgcttcatccagcaggatctgccgtacttcctgttccgaggaggcgatcgcatctgcctcgctcaacgcttttaagagcgataaatccattatgcctctcccgtgagcaacactgttttcggcatggcgtagagcacttctgcgccttgcggggtgaccagcacgacatcttcaatgcgcacgcccccttgccctggaaaataaatccctggctccacggtcagtaacatacctggctgtagcgtcgtggtgtcccgcggtgaaaaacgcggttcttcatggacttcaataccgatagcatgaccggtgttatggccgaaaaacttgccataaccggcctcggtaatcacgcggcgcgcggcatcgtcaacctgctggcagcgcacgccggggcgaattacagagattgccgcgagctgtgcctgcaggacaatctgatagacgttaaacagcgggtgagattcggcgctcaccccttcgccattcaccagcaaggtgcgcgtcatatcagagcagtagccctgatagagcgcaccgaaatcgagagtgacaaactcgcccgctgcaacaatcttgtcgctggctttaccgtgcggcagcgccccacgccagccactggcgacaatggtatcgaaagaggctttttctgcgccctgccggcgcataaaccactccagttcagcggctatctcgcattcgctcatccccgcctgaataaagcggcgaatatgctctgcgccacgatcggcaatcccgcaggcaaggcggattttctccacctcttctggcgttttgatttgccgcagcacatccggcgtggcgctaaccagtttcgcattgagttcggactgccagcggtgcgcggtttcccaactcacctgctggccttcaaaaccgagcgtttgcaactgctcatcggcaatgatttgtctgacgatggtggcaagcgtgtgcatcgcgtcgagcaaatgcagctggtaaccttgcgtgcgggcttcaacatccgcgtaatagcgcgaatccaccagaatgtgcgcactttcacggctaatcaccacatagcctgatccggtggagatccccagatgcggctgtttgttctgccgtgaggagagaagcaccgcatccagttgttgtgccttaagccagtcgcgcagcgaagcgagtaatgtcatctggatttttccttcttacaggctctcgattaacaatttacctttgcggaacatcatcagacgcaagaacaccaccatcagcgcagtaatgattgctcccagcgcgatccccgccatatagacacccagattagtgaccagcggccacgcccagatagcggactccgggaaccattgcactgcgcccagccagacagcggcggttgagccgacaatcgcgccgaccatatacgacggaatggcggtgatagggctttccagtgcaaacggaatcgcaccctcactgatccccataaacgccaggaacatcgcggttttaccctgcggataaagctgggcgttgaacaagcgtttgccagttaagcgacgatcgataatggtcgccagacccagaccaatcggcggaataacgatagcgatagaacgtgcagtgaccggtaatacgtggtcagtggtaaagctgaaggcaacgaaacctgccgctttgttgatcgggccaccaaggtcgattgctgtcgccgcggcgatccccattgcgtacatcagcgcgcccttctcacctgcagcggtcagcacggtacggataccgccgttgatccagccaccaaagggggtgatgacgtagtacatcgccagcatgacaaaaatggcggaaagaatcggtagcaaaaatgtggttttgaacgctaacaggaaatccggtaactggattttctggttcatccatttcacaaggtaaccggcaacgatagaaataatcagcgcaccaatgaaggtggacggcaccggcgaagaggtcgcccattgcatcgtgctgggatcgaagttcagcagttgcgtcggctgggtagacatcaagccgccgataaaaccagccgggaacgccagtttgccaccgatagagttcgccacaaaagcagcaaacatcggaatggcaaaaccaaacaacacgccgccgaaggactgcgacagccaggcaaatttaagtaaggagaggtcgaaaccggagaatttcccgctattaagagcatccatgatgccgatatcagcaggaattttaagccagctataagcaatcagctgactgaaagcgaggatcacaccgcccataattaaggtcggcaccatgcgtgaaatccctgacatcacatgctgcgggagttcaccccagaagctggatttagaggcctgcggattcttaactgccgctgccgcaccggatgcgccatgcacaacggttgcactgcgttttttaatggccataacaattatccctgtcgaatattactgttgttcagaggcaatcatctcttcgatttctttgatgattcccgcagcgtttttaattgcgtcctgcaaagtgatttcataaacgtcgcgtgattcgaaacgttcgttatcttccggggtaactgccacggagtggatgatgatggtcgcttcggcgatatcctgcgccgtcaggcgattctggataccgtccgcgccctgggtttcaattttcacttcataaccggcttctaccgccgcttcttccagcgcctgagcggccataaaagtgtgagccaggcccattgggcaggcacataaggcaatcagtttcttactcatcgttaattcctcgttcagtgatagttgacgagtgaaattatgaacgtgcaaaacaaatcgccgttaccagacaaataatgcatttactggagaattaatcccgctgtacggaagtgtgacgcaggtcggccttgtgagggggacacaaagaaaatttaattaactgtatgatttaaaagattatcgggagagttacctcccgatataacaggaaggatttagagaatgtgacctaaggtctggcgtaaatgtgcaccggaaccgagaaggcccggattgtcatggacgatgagatacaccggaatatcatggacatattctttaaagcgccctttatcttcaaatgcggcgcggaaaccagaggctttgaagaactcaaggaagcgcggcacgataccacccgcaataaacacgccgccaaatgtcccgagattgagcgccagattgccgccaaaacggcccataatgacgcaaaacagcgacaacgcgcggcggcaatcggtgcagctgtcagccagcgcgcgttcggtaatatcttttggcttgagattttctggcaggcggttgtcggctttaacaattgcgcgatacaaattcaccagtccagggccagaaagcacgcgttccgccgaaacatgaccaatttccgcacgcaatatttcgaggataatgccctcttcttcactattcggcgcaaaatcaacgtgaccgccttctcctggcaagcttacccaacgcttatcgacatggaccagatgcgcaaccccaagccctgttccggcaccgtaaaccgcaataggcttaccttctaccggttctgcgccaccaaactgaatcagatgctcttttttcagcatcgggatcgccatcgatacagcagtaaaatcgttaataatttccagatggctaaaaccgagattctttttcatttcggcaattgagaacgcccaggtatggttggtcattgccacccagtcaccggtaattgggcaagcgatggcaatacagccgtctttcacctcgaccttatgttcttcaagataaacgcgaatgaccgcttcgaggctggggtaatcaagccctgaataggtcttagcctgcgagatttcaccactggcaatatcacacagagcaagacgtgcgttggtgccgcccacatcaccgactaatgcatactttgtcattcttcaactgctccgctaaagtcaaaataattctttctcacactgtaaatacctgggggcataacaacaacgccggaaaggcaggctccctgtaaatatcgatctgggtcacacaattactttatcgtttcagcaccaattgcagcgatgcctttttgcaagctgggcaaactaagtatctgaccccgcataaggaatagaacatgctccatccgcgagccagaaccatgttgttattatcgctccccgccgtggcaattgggattgcgtccagtcttattctgattatggtgatgaaaatcgcctcggtattacagaatttgctctggcaacgactgccgggaactctggggatagcccaggattcacctctctggatcatcggtgtattaacgctaacgggtattgcggtggggttggttatccgtttcagccagggtcatgccggaccagatcccgcctgtgaaccgcttatcggcgcaccgattccgccctctgcgctaccaggacttatcgtagcattaattctcggtcttgctggcggcgtcagcctggggccggaacatccgatcataaccgtcaatatcgcccttgccgtcgccattggcgctcgtctgttaccgcgcgtcaaccgaatggagtggactattttagcctctgccggaaccatcggcgcgctgtttggcacacctgttgcggcggcattgatattttcgcaaaccttaaatggcagtaatgaagttccgctatgggatcgtctctttgcgccgttaatggcggcagcagctggtgcacttactaccggattatttttccatcctcatttttcactgcccattgcgcattacggacagatggaaatgaccgatattctcagcggtgcaattgtcgcggcgattgccatcgcagcagggatggtcgccgtatggtgcttaccacggttgcacgcgatgatgcatcaaatgaaaaatccggtgttcgtgctgggtattggcggatttattctcggtattctgggggttattggtggaccggtttcgctgtttaaagggctggatgagatgcagcagatggtggcaaatcaggctttcagcaccagcgattactttttgctggcggtgataaaacttgccgccctggtcgttgctgccgccagtggctttcgcggtgggcgaatcttcccggcagtgtttgtcggcgtggcattagggttgatgcttcatgagcacgttcccgccgttccagcggcaataaccgtttcctgcgctatactcggcatcgtgctggtggtaacacgcgatggctggttaagtctttttatggcggcagtcgttgtacccaataccacattgctaccgctgctctgtatcgtcatgctcccggcatggctgttattagcaggtaagccgatgatgatggtcaatcgtcagaagcaacagccaccccacgataacgtttagcaaaaaatgctctcctttatgatttaagagttatggcgatgatacggcgctttacctccccgtaatattgcgttaacaggccgctgacggcttcgatcgtgaaggagaataacaatgttcaggtcactgtttctggcggccgccctgatggcatttaccccgcttgcggcaaacgcaggtgaaatcaccctactgccatcaatcaaattacaaattggcgatcgcgatcattacggtaattactgggacggtggtcactggcgcgaccgtgactactggcaccgcaattatgaatggcgtaaaaaccgctggtggcatcatgataatggctaccatcgtggctgggataagcgtaaagcgtatgaacgtggctatcgtgaaggctggcgcgatcgtgacgatcatcgtggaaaaggccgcggacatggacaccgccattaaacacattcgccaatggagcacaatgcctgatgcgacgctagcgcgtcttatcaggcctacaaaccagctctttaacgcgtagggcggataaagcatttacgccgcatccgccaatggtgccaaatgcgacgctcattcaactacaatcccagtgccgttcctaccagtaaccagatattcagcgccactaccagcaccacaatcacccagcctgtctgttttacgcgtttactgttcaccagatcgcccatcaacttgctgtcactggtgaaaatcaacagtggaaccagcgccagggcgataccaaaacttaacagcacctgactcataaccagaatccgtgtcggatctaatcccatcagaatgacgataaatgacggcagcatggtgactgtacgacgcacccacagcgggatatgaaagcgaatgaagccctgcatcactacctgccccgccagcgtccccaccaccgttgaagacagtccggcagcaaccaggcttaatccaaagaccgttgccgcagcatggcttaacagcggttgcagcgtcagataagcctcatcaagatcggcaacaccagtatgaccagaaaagtggaacgccgccgcagctgtagccatcatcgccagattgacaaaaccggcaatcgtcatggcgatagccacatcccatttggtggcggaataacgttgttgacgcgaaccgccatgtaaatgctgagtgagcgaagagtgcaaataaatcacatgcggcataatcgtcgcccctaacacgcccgctgccaggaagaccgcctccgaagtaggtaaactcgggattaccattcctttacccagctgcgccaggttaggctgggagaaaatcaactcgacaatgtaagccgcggcaacaaacaacagtaacccgccaatcactttctccagcggtttttgcccgcgacgttgcagcattaaaatcaggaaagtcgcgatccccgtcagcaccgcgccctgcaacaacgaaacaccaagaatgagtttaaaaccgatcgccgcaccaataaattccgccaggtcggttgccatcgcaataatttctgcctgaacccaatagaaccacacgacggggcgcgggtagtgatcgcgaatctgctccgccagatttttaccggtggcaatccccagtttggccgagaggatttgaatcagcatcgccatcaggttagcccaaacgacaacccacaataactgatagccgaagctggcacccgcctgaatattggtcgcaaagttaccgggatcgatataaccaatcgccgcaatgaacgcaggtcccattaatgcgagcctcatcttgcgcgccgcccgtccgctgctactctcaacgcgatagttcgtcatcttgtgcctctaaaacatagcctttgctatgtttcatgctacgttaaatgagaatgattatcaaattcatttaaatgggttgtgatgatttctctgatagaccaggattatgactacgaaaagatagatgactcgaatgttatggttatgtttaatattagcacatttacataaccttccgcttccatacacaacatagcagaaatgtatgacagatcactatttttgaagcttgtcacaggacgtcattatagtgtgtgtcagatctcgttttccttaaccatgttacatagaatgtgcacggaaatttaacctgcctcatatttggagcaaatatggaccgcgtccttcattttgtactggcacttgccgttgttgcgattctcgcactgctggtaagcagcgaccgcaaaaaaattcgtatccgttatgttattcaactgcttgttatcgaagtgttactggcgtggttcttcctgaactccgacgttggtctgggcttcgtgaaaggcttctccgaaatgttcgaaaaactgctcggttttgccaacgaagggactaacttcgtctttggtagcatgaatgatcaaggcctggcattcttcttcctgaaagtgctgtgcccaatcgtctttatctctgcgctgatcggtattctccagcatattcgcgtattgccggtgattatccgcgcaattggtttcctgctctccaaagtcaacggcatgggcaaactggaatcctttaacgccgtcagctccctgattctgggtcagtctgaaaactttattgcctataaagatatcctcggcaaaatctcccgcaatcgtatgtacaccatggcagcaacggcgatgtccaccgtgtcgatgtccatcgttggtgcatatatgaccatgctggagccgaaatacgtcgttgcggcgctggtactgaacatgttcagcacctttatcgtgctgtcgctgatcaacccttaccgtgttgatgccagtgaagaaaacattcagatgtccaacctgcacgaaggtcagagcttcttcgaaatgctgggtgaatacattctggcaggtttcaaagttgccattatcgttgccgcgatgctgatcggctttatcgccctgatcgctgcactgaacgctctgtttgctaccgtgactggctggtttggctacagcatctccttccagggcatcctgggttacatcttctatccgattgcatgggtgatgggtgttccttccagtgaagcactgcaagtgggcagtatcatggcgaccaaactggtttccaacgagttcgttgcgatgatggatctgcagaaaattgcttccacgctctctccgcgtgcggaaggcatcatctctgtgttcctggtttccttcgctaacttctcttcaatcgggattatcgcgggtgcggttaaaggcctgaatgaagagcaaggtaacgtggtttctcgcttcggtctgaaactggtttacggctctaccctggtgagtgtgctgtctgcgtcaatcgcagcactggtgctgtaagaccatacataaaaaagccggggtaattccccggcttttttacgcctgttaatcagctaatggctgcggacgaccaattaaatatccttgcagatattgcaccccaagtttatgcaatagcgcctgctgctgtggcgtctcgacaaactccgcgaccacactcaatgacttcgctttcgccagatcggtaattgatctcacaatcatcgcatccagcgtgttcgtgacgatatctttcacaaagacgccatcaattttgatgatatcagcctgcaaacgctttaaccgttcgtagttggcatatccggtgccaaagtcatcaattgcaatccggaaaccaaacttatgcagctgctcgatgttgtacatgctgctttctgcgttagaaaacgcctgctcctcggtgatctcaagaatgaccgcctgcggggagatgtaataacgcttaaacagacgaataatccgcccggcaatattcttttgcagcagcgtgagcggcattaaattgactgaaaagcgtggaccttttttgtcgcaagggtgtgttgccagccacttcaacaaggattccagcacttgcaaatcaaaacgcgcgctaaggttaaactgagcaataaggggcagaaacttatccggggtcataatgccgccgtcatacttcagtcgcgcgaggatctcatcataaccttcaccctctttgttgcgaattggctgggcgtagagcagcaaatcaccctgatctaacgccgtgcgaatggtattcagcaatagcacctgtttagtggtttgcccggaaaccatctcctctctgctatccagcgccagcacatgatgatgtgcgcaggattgctccgccagccagcttaactgccccaacaagggttgcagggtttcctgatttccatcaaaacgcccccaggcagcaccatagcccatatccagcccggtattgttccagtgaatttgccgactattcaggatgttaaccatatgctggagtcgcccttccgtttccggcccgctcagcactaacagcagttcactacccggcaattgatacaacttttcgttttcctgcatcaacggcagcagcgtacggtaaattgagcggatacagtgaacgcgcattattaagccgtaatgacgactcataaactcaagattatcaatgcgcaggcagcaaaaactcttgcccgcctcttgctccggcgcttgctccaacgcacgaaagttgggtagaagcgttaacggatcggtcagcgcctgcaaatgccagcggcggttaagccattcactacgatgataaatacgcaccatatagagcaggcaaacactaaaggaaatcagtactgcgagaataaatgccagcgaatattcggttagtaccccttgcaaaaagttctggttgtaattcagaaggcaaagcgttgaaacagcccaggtgagatttaaaaacggatagcgaatcttaccgacaccgagggtaaagatgataaagaaaacaggtaccaggtaaccggcaataaagtcattttcatacggtgtgcacatcagaagtagcagcacgctaagagctgccagccagcttaaggtaaatgcgcgtttctctttgctcaacgacggagcgatatccctacgccacaatatctgtgcaaagtggggacttacaatcatgcgggtgagatagtaaaaaagcatgttgtaaatcagcactgcggtgaaaaggcttagcaaatcaacgaccgtgaaaatggcatccgcatcgccgaaaaaggtagatatctttagcggaaaatcaaagaaatttcccacaagatacatgctgcatttgatgccaatcggcgccaccaaaccaagccagaacagacgttgccagacgtatcggctggtcaatccataacgccaacgcgtccccaattgccagcgtaatattgcacaggcacacaggactgcaaacgcctggctgccgatcatgacggcggtctgtaaaaaagagagatgcaggttccacagattggtgcaaaacatcccgcataaaatgggaacgacaccacgccagccaaagataaacaagattgacagcattacgcacagtggcatccacgccagaaagatataattggaatggataacagcaagtggcgaaattaaacgggatagctgaataagtaccacggtgagcgtaaacgctagtgtgaatatcttgatattttttatcaggttatgctccacaaacatgagtacactactctcactgatcggggttttcaggcacacaaataataagtttattcgcatcgcgaagcaaacaggggccagcctgttgctgttttttcagtcagtgatgcattcaccacacggcactgccaggatatagactgtattacaaaagcggcaaaaggcagagacaaaaaacccccgctttgcagcgagggtttgaaatttggtggagctaagcgggatcgaaccgctgacctcttgcatgccatgcaagcgctctcccagctgagctatagccccacgagtcgtttacgtaccaaatttgctgggtgcaaaatttggtggagctaagcgggatcgaaccgctgacctcttgcatgccatgcaagcgctctcccagctgagctatagccccatcacgtaaagcttgtcgagttgacgggcggcatcatatgaattccgcccgaatgtgtcaacggcaaattgccacgtgtagtttcaatcgctgaaaaatcaggcaaatgaacaattttggaaaaccgctcgcattcagtagttattcatgtcacggtttcctgtaaagtggtgttataaaatgaactactaatagacccacatacattcagggaattgttatgttcaaggagaggatgacgccagatgaacttgccagactgaccggctatagccgccagaccattaataaatgggtacgcaaggaaggctggacaacgtcaccaaaaccaggcgtccagggtggcaaagctcgactggttcacgtcaatgaacaggttcgtgaatatattcgcaatgctgaacgtccagaaggtcagggagaagcgccagccctttctggtgatgcgccgcttgaagtgttgctggtgacactggcgaaagagatgacgccagttgaacaaaaacagtttacatccttgcttctgcgggaagggattatcggattgttacaacgcttagggattcgcgatagcaaataatatgaaaagattacgcaataaaatgaccaccgaagaactggctgaatgcctcggcgtggctaaacaaactgttaaccgttggatcagagaaaaaggctggaaaacggaaaaatttcccggcgtgaaaggcggtcgtgccagacttattctggtcgatacgcaagtttgcgagtttattcagaacacgccagccttccataacacaccgatgcttctggaagccgaagaaccccttgccgaatacgcaccgggtattcgcactcctgcttatcggcaaatcatcagcgcaatagacaacatgactcacagtgagcaagaaaaagttgcgcaatttttgtcacgcgaaggaattcgtaattttcttgctcgtctcgacatagatgaatcagcataaataaaaaacggcaggggtatctctcctgccgtttatcttttatgcgctaattactgctgattttcgcgttcagcaataaaagccagcgctttgttgatacgctcgatactgcgggtcttaccgattgcgtgaacggtaacatccagcgccggagactgccccgcaccggttacggcgacacgcagcggcataccaactttacccatacccacttccagctcatccgccgtcgcctgaatagcgtgatgaacgttttcagcggtccagtcagtaatcgcagtcagtttgtcacgaactacttccagcggctgacgcgctaccggacgcagatgttttttcgcggcgtcggcatcgaactcagcaaaatcttcgtagaaataacggcagctctgtgccatctctttcagcgtcttgcagcgttcgcccagcagtttcaccagatcagccagctgcgggccgttacgggtatcgatattttcctgctcaatgtgccactgtaagtgagtagcaacatactccggcggcaacgcgttaatgtagtgatggttcagccacagcagcttgtcggtgttgaacgcactggcagatttgctgacggcattcagagtgaagtatttaatcatctcttcacgagtgaagatttcctgatcgccgtgggaccagcccagacgcaccagatagttcagcagtgcttctggcagataaccatcatcacgatactgcattacgctgaccgccccgtgacgtttggacagttttttaccgtcatcgccgttgatcatagaaacgtgcgcgtaaaccggtaccggcgctttcagagccttaagaatgttaatctggcgcggtgtgttgttgatatggtcttcgccacggataacgtgggtgatttccatatcccagtcatcgacaaccacacagaagttataggttggggaaccatcggtacggcggataatcagatcatccagctcctggttgctgaactcgatcggaccacggatctgatcgtcaaaaacaacagaaccttcctgcgggttagcaaaacgtacgacacacggctcatcatcagcgtgatgctcatgactgtggcggcagcgaccgtcataacgcggcttctcacctttcgccatttgctcttcgcgcagcgcttccaggcgctctttagagcaatagcatttataagctgtgccctcttccagcatctgatcgatcaccgcgttgtagcgatcaaaacgtttggtctggtagtacggaccttcatcccactccaggctcagccagttcatgccatccataatggcttcgatagcttccggcgtggaacgctcaagatcggtgtcttcaatacgcagcacgaactcaccgccgtggttacgtgcaaaaagccaggagtaaagagcagtacgcgcgccgccaacgtgcagatagcctgttgggcttggcgcgaagcgagttttgattttcatgaaatggccttacgtttagaaagatgccgacaaccggcaaatcctggaaaaattgagtgggcgatattctatcactcccgcctgattcctcaatgtagttcgggttgcaaccttacgcattattgttttcgttgacaaattgcgcaacacggtctgttttgcgatcatcttgcttaaatttacgacgaacgaacaatttctttagaaaatgcgttgactcattttgaactctccctataatgcgactccacacagcgggggtgattagctcagctgggagagcacctcccttacaaggagggggtcggcggttcgatcccgtcatcacccaccaactacttatgtagtctccgccgtgtagcaagaaattgagaagtgggtgattagctcagctgggagagcacctcccttacaaggagggggtcggcggttcgatcccgtcatcacccaccactttctcgccagctagatttcttgtaaaaatgtgaagtaccgaagtgggtgattagctcagctgggagagcacctcccttacaaggagggggtcggcggttcgatcccgtcatcacccaccacttcgggtcgttagctcagttggtagagcagttgacttttaatcaattggtcgcaggttcgaatcctgcacgacccaccaatgtaaaaaagcgccctaaaggcgcttttttgctatctgcaatttgcgaaattgcctgatgcgcttcgcttatcagaccaactatgtccggcagttcccgtgcctctcatctactgcgccaacgccgccagcagtttaaccagcgcgggcgtcacctgctgcgtttcataaacaatatataagtctgccgggatgcgttctttgagcggacggaatatgacaccgggccagttcatctgcgcgtagctgtccgctatcaatgtgataccaatacccatactgactatggcgagtaccgtttgcggttcattaacttcgcgaataacaaccggtgaaaatcccacctgctggcaaactcgctgcaaaaaatcccagtcagtgtacacgggcggcattgtaacgaaatactcgtcacgtagcgcttccagcgggacggtggaaaatgatgagagatgatgctcttcaggcatcgccaccagaaacgccgattcatgcaaccgtaagctggtaaaaccagtcggtggttctgtcgccattcgccagatcccggcatcaagttcgcggcgttccagcaaggccatttgcatcgctggcatcttttcgcgaaacagaacttcaacgttaggattttctctaaggaatcgccgcataaccgggcgcatccgtccccacattgccgttcccacaaccccgagttcaatccgccctgcttctccccgacctatttgttcaacccgagccaatatattatttgcattcaccagcaatcgacgcgattcttccatcaagattttgcccgcgtgtgtcagtacgacgctgcgcgaatggcgaataaaaagctgcgtaccgagttgattttccagctctttaatatgaatactgagcggaggctgagacatatttaaacgcgctgctgcgcgaccaaaatgcaactcttccgctacggcaagaaaataacggagcaacttaagatctgttctatatacgcgttccataattaagtgctccatataaaaaatacatcgtattaaattatcatggcataaagtatttcaccaccagatatccgatatacataaacacgatggataatatacccggcaatacatttggaacaggaataggtaatcgcacgattgtaaacaaagcaccaatgccaaaaccaacgccagaagaaaataaaatatctttcactaattaacctttatcataaaagcagccccaaggaacagagctgcgaatccttttaatgtgtaactgaacgatgcgttatcttttcagggtcatggttatatttaaacccaaagaaaaatatcactgcgaggaaaagagcataccctgcaaacatcagccaaatggtatgccagtcttttacgccatccaccgagaagtaatccactgccataccgctcagaatcgagccaacccatgcgccgacgccatttaccatcgtcataaaaaggccctgggcgctggcacgaatgctggaatcaacttcctgttcgacaaagaccgaaccagaaatattgaagaaatcgaatgcacaaccgtaaacaatcatcgacagcaacagcaaaataaacccggttggtgatggatcgccataggcaaagaagccaaagcgcagcgtccacgccaccatactcatcagcatgacggttttaataccgaaacgcttcaaaaagaacggtatcgtcagaatgaaaccgacttcagccatctgtgaaactgacagtaaaatggacgggtatttcaccacgaagctatcagcaaactcaggattacgggcgaaatcatgcaggaacgggttgccaaaaacgttggtaatttgcagcaccgcacccagcatcatggcgaagaggaaaaagatagccatgcgtggatttttaaacagcacgaaggcatccagacccagcttgctggcaagcgatgtagtcgcttttttctccgcaaccggaatcttcggcaaagtcaacgcataagccgacagcagcaatgacgcaccggacgcgatatacagttgcagactactcaattccagatgcagcaggcttactgcccacatggcgacaatgaaccccaccgtaccaaaaacgcgaatgggcgggaaagcggtcaccgggtcaagccctgcctgggcaagacaggaataagagacgctgttcgataacgcaatagtcggcataaacgccatcgcattgactaacatcacccaaaacatcatatccggatcagttacggatgccgcataaaaaagtacgcccgcacacaccaggtgacacagcatgtatgcacgttccgcacgcagccatttatccgcgataatccccataatgccaggcataataatcgcagcaatccctttggagctatagaccataccgacatttgcgccggtaaaatgaagggtattaatcatgtaagaaccgagggtaaccagccagctcccccagataaaatattgcaaaaaggacattacctttaagcgcaaagcgatgctcataatcgtttccttgtcgcatcatatggcctcactcagtgaggccgtttattgttgttttactcaggcaattttgcgcagaaagccgcaaataagattaataaagttttgctttgagagttccgctgctgccagcgtttgggcatgagaaagcttcacgtcactcagaccttccgccatgttggtaatcgcagagaccgcaacgactttaagttcgcaatggcgagctgaaataacctcaggcaccacagacataccaacaacatccccaccaataatttgcatcatgcgaatttccgccgcagtctcgaaattcggccccggatatgagacgaacacgccctccgtcagagggaacccctcttctttcgccactttttgtaacagtgcgcggtattccgcatcgtaggcattcgccagcgagaagaagcgctcaccaaaacgttcatcattaagacccaccatcggcgttcccggcatggtgttgatgtgatctttcaatgcgaccagactgccggcccccacttcagggcgcagtgagccagccgcattggtgcagaacagcaactcgcagcccagcaacttaaaggtacggattgcatccgtcatgatggtcatcccacgaccttcgtagaaatgtccgcgacctttcatacacgccactggcaccccctggagataacccagcaccagctcacccgcatgaccgtgtacggtacttaccgggaacccaggcagcttttcgtaggaaattgcgaccgcgttctcaatctgatcggccagcgcgcccagcccggaacctaaaataaaggccactcgtggcgtgaaatcaggtttataagtcttgataatatctacgcaatacagtgggttatgagaaaactgagcctgatacatatatatcctttttttgtagggtggaatctaacgcctttttataacgagattgccctacctcataccaatacacttttttcatgtatccgatagttattcgatatcgatatatttatattttttcactattaataggctgaaaaaactgtattggtactctcctttcccttgcattaacaatatgccgcttttaatcaaccttttattaagcaatcaactaataacgatcggcatagggaattatgctatgaaaaaacatctttttactctgacactctcttctgtattggcgataccagcagtatcccatgcagaatttaaaggcggttttgctgatataggtattcattatcttgactggactagcagaaccactgagaaatcgtcgaccaaatcacacaaagatgattttggatatctggaactggaaggcggcgctaactttagttggggagaaatgtacgggttcttcgactgggaaaacttttataatgatcgtcatgataaaccgggtagcgagcagcgttatacatttaaaaataccaaccgtatttacctgggtgacaccggatttaatctctacttgcatgcgtatggcacctacggttctgcgaatcgtgtgaatttccatgacgatatgttcctttacgggatcggctacaatttcaccggcagcggttggtggttcaaaccgttctttgcaaaacgctatacagaccaaacctattataccggcgataacggttatgtcgccggttgggttgcaggttacagctttatgctgggcagtgagaaattcaccctcaccaactggaacgagtacgagtttgatcgtgatgccacctacgcggcaggtaatggcggcaaagaaggtctgaacggtgccgtcgcactttggtggaatgcaacttcacacatcaccacagggattcagtatcgttatgcggatgacaaactgggcgaagatttttaccaggatgcgataatctactccatcaaatttaatttctgattgattactgccggagctcccggcagtatgaattcactctatatctgatacaacggatccccttcccgcccagccattagcgcattgccctggtctcgtactacgtcccataacgcttgtgcggcggtggaaagtgaacggttcttcctgcgcaccagcatcaactggcgttcaaccactggcgtaatgcgctttaccaccagtgggctaccttcaggcaatggtagcgccagtgcgggaagaatactgatgccgatgcctgcggctaccatcgggaacagcgtcgccggatgaccaatctcctgcacaatattcgcctgaataccgttgcgcgccagcgctgcgtcaatcagcggtcggctgcctgacgcgtaatcctgcaacaccaatttcgctccctgtaatgcctgccaggggacataatcttccacggccaaagcgctatcgcgatggcaaagcagaaagaaaggctcggaaagaatcgcttcacattgcagatcgcccactgggcctggatcgatgacgatgccaaaatcgacatctccctggcgaatactttccatcacccactgctgcggacgatcgtgcaggacaaactgaatatctggatagcggcgatggctttcagcaatgcattgcggaataagatgcgcggaaatggtctggctggcagcgacccgaacttttccgctcagttgttgccccatacgcccggtatcgcgcaacgtgctgttaagttcatccagcagtcgctcaagacgcaaagccaactgctgccctgcatctgtaagcaccacttcacgcgtggttctgtccagcaggcgaacaccagtatgattttccagctccttcacactgtgactcactgccgactggctcaggccgatacgctctcctgcacgactaaaacttttctcctgcgctactgtgacgaaaacctttaattgctttaaagaataattcatctgtttttttcatgaatggatgcaataaatcaattttatttctcaaactggaagaagcacaatagaaccatcgatcatctggagtctttatgaaactttttcgtatcctcgatcctttcaccttaaccctgatcacggtggtgttgctggcatctttctttccggccagaggcgatttcgtccccttctttgaaaatctgaccactgcagcgattgctctgctgttctttatgcacggcgcgaagttgtcgcgtgaggcaattattgctggcggtggtcactggcgactgcatttgtgggtaatgtgcagcaccttcgtgctgtttccgattctgggcgtgctgtttgcctggtggaaaccggtaaatgtcgacccgatgctctactccggttttctctacttgtgcattctccccgcgaccgtgcagtctgcaatcgccttcacgtcaatggcgggcggtaacgtcgcggcggcggtttgttctgcgtcagcatccagcctgctggggattttcctttcaccattgctggttggtctggtgatgaatgttcacggtgcagggggcagccttgagcaggtcggtaaaattatgctgcaactgttgctgccatttgtgttggggcatctttcccggccgtggattggtgactgggtgtcgcgtaataaaaaatggattgcgaaaactgaccagacgtccattctgttggtggtttatacggcattcagcgaagccgtcgttaacggtatctggcacaaagttggctggggatcattgctgtttatcgtggtggtcagttgcgttcttctggctatcgtgattgtagttaacgtctttatggcacgccgactgggcttcaataaggcagatgaaattactatcgtcttttgtggttcgaaaaagagtctggcaaatggcatcccgatggcaaacattctgttccccacatcggtgatcggtatgatggtgctgcccctgatgattttccatcagatccaattgatggtctgtgcggtgctggcgcgtcgatacaaacgccagaccgaacagttacaggcgcagcaggaaagcagcgccgataaagcttaaagcggacgcttcaggggctggaccagttgcgtcagcccctcgtttttaatcagcagcgtgatttgcattagctcaccgagcttccctgcagggaactcatctttgcgggcaaaccacagcagatactcctccggcaggtcgattaagcgacgccctttgtacttgccaaacggcattatcgtattggctatttcaatcagctgctctttttccatctcagctacccagcaaacgcagcatttccgtttcgtcgatgacttcaatgcccagttcctgcgccttcgccagtttagatcctgcagcttcacccgctatcaccagatcggttttcttcgacacgctgcccgcgactttcgcccccagttcgaccagtcgagctttagcgtcatcacgcgacatctggcttaagctgcccgtaagcaccacggttttaccagcaaacggactgtcaatctcttccgcattgataacgatcggctcaggccagtgaacaccttccgccaacagctcgctgatgacattgcggttgctttcttcggcaaagaagttgtgaacgtgggaggcaacgacaattccaacatcaggcaccttttgcagctcttcaatcgacgcggcttccagcgcttccagcgtgccgaaatatgccgccagacctgctgcggtagcctcgccgacttcacggatgccaagtgcatagaggaagcgggcaaaggtggtttctttcgctttttccagcgcgttaaccacgttttgtgccgatttcggccccatacgctccagtccggtcagtttgcctgcggtgagtttgaacagatccgccggagtgtggacatattctttttcaaccagttgatcgatgattttgtcgcccattccgtcaacatccatcgcacggcgggaaacaaagtgtttcagagactctttacgctgcgcaccgcaaatcaggccaccggtacagcgggcaaccgcttcaccttccacacgctcgacgtcagaaccacataccggacaatgcgtcgggaatacaacctcacgggtatcttccgggcgttcagaaagcacgacgttaaccacctgcgggatcacatcgcctgcgcggcgaatcaccactttatcgccaatgcgtaaaccaagacgttcgatttcgtcagcattatgcagtgtagcgttactcaccaacacgccagcaacatggacaggttccagacgcgcaacaggcgtaatcgcgccagtacgcccaacctgaaactcgacgtcacgcacaaaggtcatctgttcctgcgccgggaatttaaacgctaccgcccagcgcggggcacgcgcgacaaagccaagctgctcctgctgtgccagtgagttgaccttaatcaccacgccgtcgatatcaaagcccagcgtcggacggtcttcttctactttgtggtagaacgccagcacttcttccgccgattcacaaagcgttacccgatcgctgaccggcaaaccccactttttaaattgcagtaaacggccaagatgagtatccggcagctcgccaccttccagaacaccgacgccgtagcagaagaaagtgagcggtcgcttcgctgtaatacgcggatcaagctgacgcagtgaaccagctgccgcattacgtgggttagcaaacactttcccgcccgtgcgtcgcgcatcttcgttaatcttttcgaaccccgcctgcggcaggaacacttcaccacgcacttccagacgcgccgggatattctctccgtgtagcttcagcggaatggcgcgaatagtacgcacattagacgtaatatcttccccggtggtgccatcgccacgcgtcgcggcactgactaaaacgccattttcatacagaatactgacggcaagaccatccagcttcagctcacagcaccaggtgactttctcgttgcttttcagacggtcctgcacacgtttgttgaaagcaagaaagctttcttcatcaaaaacgttatccagcgacagcattggcacttcatggcggatctggctgaaagccgccagcggcgctgcacctacacgttgggtaggcgaatcaggcgtaatcagttctggatgtttggtttccagctcgcgcagttcgcgcatcagcctgtcgtattcagcgtcgggaatttccggcgcatccatcacatgataaagatattcatgatggcgaagcgtcgttcgcagttctgtcagttgttgttcgattgattccatatcgcaccatcaatgctaaaaacccccgacaagcgggggttcgaagaggagttaatttgccttaagtgtatcaggcgttggcgtctttgacttcgcggatgatgtcctggtactcgcgcaatttctgcggagtcatcatacggcgctgatcgtcaagcactacaccgcccacttcatcggcaatatgctgcgcagattgcagcatcagcttaaagttctgcagctcgtcaccgtaagacggtacctgcataaagatagtgacacccggagtagtgaaatccttcatttcaggatcaaaggttcccggtttcaccatattcgccaggctgaataacgccgggccgctgccatccgggctaagatgacgatggtaaatgttcatatcgccaaaaatgaagcccgcttgttgaatgctgttaagaagcagttcaccgtttagctcgctaccgtgatgcgccgcgacgttcatgataatcaccgcttctttgcgcttcggtttatccataactggagccggttccgctacaggctcaggctgtggtgccgctacaggctctgcaggctggaaagcctgttgtgctggttgcggtgctgaatgcactggctgcggcgctgacgcgacctgtggcgaaacaggctgctgcaacggctgttcaggctgcggctgataggcaggctgctgcacaggttgctgcaccggctgcgttggacgcggagcatgttgcggcggtacctgcgcttcaggcggctgctggaccggttgacgcggctgcgcagacgcataaggcggttggtactggtgttgcggcgacggacgagcagcctcatgctcctgggcgttagccggggcatgattcacgcggtgaacacgaacctcaccaacgccctcatcatcttcgacatcctcgtcataagaatcgtcgtcacgttttgacttcattcgttttaatggccgatcgcggaacatagaagatcgttctttacggctggtccagaaaccatgtaccagtaaagcgattatggcgatcgcgccaacaatgattaatatcagacgcaaatcctgcatcattatattctctgttgttctaacaccttgccaccacggcaaacatttactcactaagagtatttgccgattacctcaagtgcaagtgcactattaactttcacagcacaaagatagatgaaatcgtgctttttgctgttttttcgaacatatcctaactgtccattgcgcaattacccggtaaaatacgcagaattttcctgggattggtcaaaaggagctcatcctgattatggtttcatcattcacatctgccccacgcagcggtttttactattttgcgcaaggctggaagctcgtcttgcaacctgggattcggcgtttcgttattttaccgctgctggtcaatattttgttgatggggggcgcattctggtggctctttacgcaactcgatgtctggatcccgacgctcatgagttatgttccggactggttacaatggctgagctatctgttgtggcccctggctgtcatctctgtgctgttagtgtttggctatttcttctcaacgattgctaactggattgctgctccgttcaacggtttattggctgaacaactggaagcaagactgactggcgctacaccgccagataccggaattttcggtatcatgaaagatgtgccgcgaatcatgaaacgcgaatggcaaaaatttgcctggtatctgccgcgcgcaattgtattgctaattctttacttcatccctggcattgggcaaaccgtcgcgccggtactgtggttcctgtttagcgcctggatgttagccatccagtattgtgattaccccttcgataaccacaaagtgccgtttaaagagatgcgcaccgccctgcgcacacgcaaaatcaccaatatgcagtttggtgctttaaccagcctgtttacgatgatcccgctgcttaatctgttcattatgcccgttgccgtttgtggcgcgacggcgatgtgggtcgattgctatcgcgataaacacgccatgtggcggtaacaatctacaggttattttgtaaaccgtttgtgtgaaacaggggtggcttatgccgccccttattccatcttgcatgtcattatttcccttctgcatatagatatgctaaatccttacttccgcatattctctgagcgggtatgctacctgttgtatcccaatttcatacagttaaggacaggccatgagtaagatttttgaagataactcgctgactatcggtcacacgccgctggttcgcctgaatcgcatcggtaacggacgcattctggcgaaggtggaatctcgtaaccccagcttcagcgttaagtgccgtatcggtgccaacatgatttgggatgccgaaaagcgcggcgtgctgaaaccaggcgttgaactggttgaaccaaccagcggtaataccgggattgcactggcctatgtagctgccgctcgcggttacaaacttaccctgaccatgccagaaaccatgagtattgaacgccgcaagctgctgaaagcgttaggtgcaaacctggtgctgaccgaaggtgctaaaggcatgaaaggcgcaatccaaaaagcagaagaaattgtcgccagcaatccagagaaatacctgctgctgcaacaattcagcaatccggcaaaccctgaaattcatgaaaaaaccaccggtccggagatctgggaagataccgacggtcaggttgatgtatttattgctggcgttgggactggcggtacgctgactggcgtcagccgctacattaaaggcaccaaaggcaagaccgatcttatctctgtcgccgttgagccaaccgattctccagttatcgcccaggcgctggcaggtgaagagattaaacctggtccgcataaaattcagggtattggcgctggttttatcccggctaaccttgatctcaagctggtcgacaaagtcattggcatcaccaatgaagaagccatttctaccgcacgtcgtctgatggaagaagaaggcattcttgctggtatctcttctggagcagctgttgctgcggcgttgaaactacaagaagatgaaagctttaccaataagaatattgtggttattctgccgtcatcgggtgagcgttatttaagcactgcattgtttgccgatcttttcactgagaaagaactgcaacagtaatgccagcttgtaaaaaatgcgtaaaaaagcacctttttaggtgcttttttgtggcctgcttcaaacttttcgcccctcctggcattgattcagcctgtcggaactggtatttaaccagactaattattttgatgcgcgaaatttaatcgttacaggaaaagccaaagctgaatcgattttatgatttggttcaattcttcctttagcggcataatgtttaatgacgtacgaaacgtcagcggtcaacacccgccagcaatggactgtattacgctcttcgtgcgtcgcgtctgttaaaaactggcgctaacaatacaggctaaagtcgaaccgccaggctagactttagttccacaacactaaacctataagttggggaaatacaatgttccagcaagaagttaccattaccgctccgaacggtctgcacacccgccctgctgcccagtttgtaaaagaagctaagggcttcacttctgaaattactgtgacttccaacggcaaaagcgccagcgcgaaaagcctgtttaaactgcagactctgggcctgactcaaggtaccgttgtgactatctccgcagaaggcgaagacgagcagaaagcggttgaacatctggttaaactgatggcggaactcgagtaatttcccgggttcttttaaaaatcagtcacaagtaaggtagggttatgatttcaggcattttagcatcccccgggtatcgctttcggtaaagctctgcttctgaaagaagacgaaattgtcattgaccggaaaaaaatttctgccgaccaggttgatcaggaagttgaacgttttctgagcggtcgtgccaaggcatcagcccagctggaaacgatcaaaacgaaagctggtgaaacgttcggtgaagaaaaagaagccatctttgaagggcatattatgctgctcgaagatgaggagctggagcaggaaatcatagccctgattaaagataagcacatgacagctgacgcagctgctcatgaagttatcgaaggtcaggcttctgccctggaagagctggatgatgaatacctgaaagaacgtgcggctgacgtacgtgatatcggtaagcgcctgctgcgcaacatcctgggcctgaagattatcgacctgagcgccattcaggatgaagtcattctggttgccgctgacctgacgccgtccgaaaccgcacagctgaacctgaagaaggtgctgggtttcatcaccgacgcgggtggccgtacttcccacacctctatcatggcgcgttctctggaactgcctgctatcgtgggtaccggtagcgtcacctctcaggtgaaaaatgacgactatctgattctggatgccgtaaataatcaggtttacgtcaatccaaccaacgaagttattgataaaatgcgcgctgttcaggagcaagtggcttctgaaaaagcagagcttgctaaactgaaagatctgccagctattacgctggacggtcaccaggtagaagtgtgcgctaacattggtacggttcgtgacgttgaaggtgcagagcgtaacggcgctgaaggcgttggtctgtatcgtactgagttcctgttcatggaccgcgacacgctgcccactgaagaagaacagtttgctgcttacaaagcagtggctgaagcgtgtggctctcaggcggttatcgttcgtaccatggacatcggcggcgacaaagagctgccatacatgaacttcccgaaagaagagaacccgttcctcggctggcgcgctatccgtatcgcgatggatcgtaaagagatcctgcgcgatcagctccgcgctatcctgcgtgcctctgctttcggtaaattgcgcatcatgttcccgatgatcatctctgttgaagaagtgcgtgcactgcgcaaagagatcgaaatctacaaacaggaactgcgcgacgaaggtaaagcgtttgacgagtcaattgaaatcggcgtaatggtggaaacaccggctgccgcaacaattgcacgtcatttagccaaagaagttgatttctttagtatcggcaccaatgatttaacgcagtacactctggcagttgaccgtggtaatgatatgatttcacacctttaccagccaatgtcaccgtccgtgctgaacttgatcaagcaagttattgatgcttctcatgctgaaggcaaatggactggcatgtgtggtgagcttgctggcgatgaacgtgctacacttctgttgctggggatgggtctggacgaattctctatgagcgccatttctatcccgcgcattaagaagattatccgtaacacgaacttcgaagatgcgaaggtgttagcagagcaggctcttgctcaaccgacaacggacgagttaatgacgctggttaacaagttcattgaagaaaaaacaatctgctaatccacgagatgcggcccaatttactgcttaggagaagatcatgggtttgttcgataaactgaaatctctggtttccgacgacaagaaggataccggaactattgagatcattgctccgctctctggcgagatcgtcaatatcgaagacgtgccggatgtcgtttttgcggaaaaaatcgttggtgatggcattgctatcaaaccaacgggtaacaaaatggtcgcgcctgtagacggcaccattggtaaaatctttgaaaccaaccacgcgttctctatcgaatctgatagcggcgttgagctgttcgtccacttcggtatcgacaccgttgaactgaaaggcgaaggcttcaagcgtattgctgaagaaggtcagcgcgtgaaagttggtgatactgtcattgaatttgatctgccgctgctggaagagaaagccaagtcaaccctgactccggttgttatctccaacatggacgaaatcaaagaactgatcaaactgtccggtagcgtaaccgtgggtgaaaccccggttatccgcatcaagaagtaattcttgccgcagtgaaaaatggcgcccatcggcgccatttttttatgcttcagccagaggcggcaaaatcaattcatcgctctcatgctgctgggtatagcgcatcacttccagtacgcgcaaccccgcgcggtgtaccgcatcggttaacgccttccctttcagcaaaccactgataagctgagcacaaaacaggtcgccagtccctttcaggtcagttttaacccgggaatgggaaatgacattcacgctgtcggcactgaccaccaccacctgcatctcctgattttcttcattgccggaggcgctggtaatcaccacccactttaatgtgtctgaaagcagactttttgcggcagcaatggcactgtcgagatcgcggcaatctttaccggtcaggatttccagctcaaagatattgggggtaattccctgtgccagcggcagtaaatattgtcgatacgcctcgggaaggtcaggtttgacataaattccgctatcaatatcgccaatcaccggatcgaccatgatcaataggtcaggatggtctttgcgtagcgcagtcagccactcggcaaggattttgatttgcgatgccgttcccatatagcccgtggttacagcacgaagttggcgcagcgcatcacgctcctgaagcgcacgcaaataaccgctaaaccattcatccggaatcgcaccaccgtagaaagtgtcataatgcggcgtattgctcagcaataccgtcggcacggcaaagacattcaggccgttctgtttgatagcaggcaccgcaatgctgttgcctacgctgccgtacactacctgcgactgcacggcaacgatatccgcctgcagtgccctgctcttatcgttaaacaacaacaaactactcatttaattttttctccttgccgatgatcctcatcgtattccagccgaaactttacctgattctggcagtcaaatcggctattacaaaacaaggataaggtaattcagtgaagaaaatcatttgtctggtcgttacgctgctaatgacactccccgcttatgcgaagttaacggcccatgaagaagcccgtatcaacgccatgctggagggattagcacagaaaaaggatttgatatttgtgcgcaacggtgatgaacatacctgcgatgaagcggtttctcatctgcgcctgaagctgggcaatacccgtaatcgcattgatacagccgagcagtttattgacaaggtggcctcgtcgtcatcgattaccgggaagccgtatatcgtgaagatgcccggtaagagcgatgagaacgcacagccttttttacatgcgttaattgcgcagacggataaaacggtgcctgcgcaataatcttaaatccccgccccctggctaaaatgctcttccccaaacaccccggtagaaaggtagcgatcgccacgatcgcagatgatcgccaccaccaccgcgccagggttagcttttgccacccgcagtgctccggcaaccgcgccgccggagcttacgccgcagaaaatcccttcccgcactgccagttcgcgcatggtgttttccgcatcgcgctgatgaatatccagcacctcatccaccagagaagcattgaaaatccccggcagatattccgcaggccagcggcgaatgccgggaatactgctgccttcttccggctgcaggccaacaatggtcaccggtttggattgttcgcgcataaagcgtgacacgccggtgatagtgccggttgttcccatgctggagacaaaatgggtaatacgcccgccagtttgctgccagatttctggcccggtagtggtgtaatgggcgtaagggttatcgggattattgaactgatcgagcaactttccttcgccgcgattcgccatttcaagcgccagatcgcgtgcgccttccatgccctgttctttggtgaccagaatcagttctgcaccgtaggcacgcatcgccgcacggcgttcctggctcatgttgtcgggcatcagcaatttcatgcgatagcctttaagcgccgcaatcattgccagcgcaatgccggtgttaccactggtggcttcgatcagcacatcacccggtttaatctcgccgcgcttttccgcctcgacaatcatcgaaagcgccgcacggtcttttaccgatcccgccgggttattgccttccagttttaaccacacttcactgccgttatccggcgccattcgctgcaacttcaccagaggcgtattgcctattgtttgttctaatgtactcacgatctctgtccatacgtggtgttgcctgatgcgacgcttacgcgtcttatcagacctacaggttacaaaaccttgccattaaaaagcccggatcgcgggaagcgcctccgggcgtttaacattcactcaacctatcaggcgctttgtgcgagagcaagttcctcatcgcgggtttcaatacgctcatcgccgttatacagccgcgcatgttgcagaccaacgtataaacgatcgccacgctgcggggcatcgtcgccatgcatcacgaccgtcagcggttcgttgtaccaccccagcggctgcaccactaattgggtgtagtgacctttcgggctggcttccagtacctgtacgggtagcggcgaatcgaggctggtacggcggctgatatccacttcccacgggcgcaggaagagatccaccggcccctgatacgcgggggtgtatcccagcggccagcgatgtgcgccaacgtggaactgcccgccgcgaatggttccctgcaggcggtttacctcgcccataaactccagcacaaaacgagtcgccggttcacgccatacctgatccggtgcgtcagcttgttcaatattgccctgactcatcaccactacacgatcggctacttcggtcgcctcttcctggtcgtgggtcacgaacacgctggtgaatttcagttcttcatgcagttgacgcagccagcgacgcagctctttacgcacctgcgcatccagcgcgccaaacggttcatcaagcagcaaaatttgcggttccacagccagcgcgcgtgcaagcgccacacgctgtttctggccgccggaaagctgcgccggataacgatccgccagatgcgcgagctgcaccatctccagcaattttgtcactttcgctttgatcgccgccgcattcgggcgttcacgccgtggcaacaccgtcaggccaaaagcgatattgtcaaacaccgtcatatggcgaaacagcgcgtaatgctggaacacgaaaccgactttacggtcccgcgcgtgcagacggctcacgtcggtaccgtggaagcgaatatgcccgctggtttgatgctccagcccggcaataatgcgcagcagcgtggtttttccggaaccggacggccccagcaacgcgaccatctgaccagaaggaatatccagtgagatatcgttcagcacctgggtgcgaccaaacgacttcttaatattggcaatctcaatgctcatgatgttcctcctgctgcgcgcgtttttcctggttctccaggcgccactgcaacatactctttaaaaacagggtgataatcgccatcagcgtcaacagcgccgcggcggtaaaggagccaacggtgttgtagtcctgctccagcaattcaatctgtaacggcagcgaaagtgtttcgccgcgaatcgagccagaaaccaccgacaccgcgccaaactcgccaatcgcgcgggcgttggtcagcaccacgccgtaaagcagcgcccagcggatgttcggcagcgtgacgcgacggaacatctgccagccggacgcgccaagcaaaatcgccgcttcgtcttcctggctgccctgacttaacattaccggcaccagctcgcgcaccacaaacggacacgtcacgaagatggtgaccagcaccatacccggccaggagaacataatttgcagattatgttcatccagccagccgcccagcgggccgttagagccgtagaacagcagatacaccagaccagcaaccaccggcgacacggcaaacggaatgtccagcagcgtcagcaatagctggcgtccggggaagttaaagcgcgtcaccagccaggccagcagaataccgaacaccaggtttaccggtacggcaatcaacgcgatcatcaccgtcagccagatggcgtgcagcatgtccggatcggccagattttgtaacaccggcatcagtcctttgctgaacgcctgtacgaagatataaatcatcggtaccagcaggatgaacgccgataccagcatcccgatgccaatcagaaaccatttgccccagttaatcgggcgcgcgtcataacgcttcaattgtgtcacttccgccattaatgacctaccacacgccgaccaaagcgactttgcagagtgttaattgagaacagcaacagcagcgatgccgcgaggatcaccgaggcaatcgcgctcgccgccgggtaatcaaactcctgtaagcgaacaaagatcatcagcgacgtcacttctgttttccaggcgatattcccggcgataaaaatcaccgcgccaaactcaccgaggctgcgggtaaacgacagcgccacacccgccaccagcgccggagatagttccggctgcaccactttgcgaaaactctgccagcgtgttgcgccgagcgtttctgccgcctcttcatattccgggcctaactcttccagcaccggctgcacggtgcgcaccacaaacggaatgctggtaaaggccatcgccaccgcaatccccagccaggtataggtgactttgatatcaaacttcgccagccattcaccgtaaaaaccgttcacggaaaagagcgaggccagcgttaaaccggcgactgccgttggcagcgcaaagggtaaatccatcagcgcatcaagcagcgtgcgacccggaaagcgatagcgggttaagatccacgccatcagcagaccgaaaacgccgttaaaaatcgatgccacaaacgccgacagcagcgtcactttataggctgcgaccacctgcgggttggtgatcacctcccagtactgcgcccagctcatctgggccagttgcatcaccagcgcggagagcggcagcagcaaaatcaggcacacaaacagcagactggtgccgaggcttaaggtaaagcccggcagcacgcgtcttgaagaaacggcaaacattacttacgccccgccgctaacagcttgtctaactcgccgccgctggtgaagtgggttttcatcacttccggccaggagccaaatttatcttccacgcggaacagctcggtctgcgggaatttatctttcagtttgcccatgacttccgggttatttacgcggtagtaatagtcggtgatgatggtttgcgcctgcgggctatagagccagttcaggtaagcttttgctgctttttccgtaccgttggcctgcacatttttatcgacccacgccaccgggaattccgccagaatgttggttttcggaatcaccacttcaaagccctgcgcttcatactgtttacggatgttgttcacttccgactcgaagctgatcagcacatcgcccaggccgcgctcggcaaaagtggtggtcgcgccacgaccgccagtatcgaacacttcaacgtttttcaggaactgggtcataaactgttcggttttggctttatcaccaccgtcggctttgtccgctgcgccccatgccgcaaggtaggtataacgcgcgttacccgacgttttcgggttcgggaaaatcagcttcacgtcagagcgtaccaggtcgttccagtcgtggatattcttcgggttgcccttacgcaccaggaagcccatggtggagtagaacggcgagctattattcggcaggcgcgactgccagtccgctgggatcagcttgcctttatcgtgcaggatttgtacgtcggtcacctggttataagtgacaacgtcggcttttaaaccctgcaaaattgccagcgcctgttttgatgatccggcatgagattgtttaatcgtcagtttgtcgccaccgttatcttttgcccattgttgctcaaacggcgggttcagggcggcaaacagctcgcgggagacgtcataagaactgttcagcagttccgttgcctgtacatggcccgccagtagcagagaagcaaccagcacgagtgagttctttttcagtaagttaacggccattgcgcacccttataaatttaatgactttctaatagccatcatatttataacggacgtgaaaggagtaacggttttatataccgtttggtgatttggaagttgaaaagggaataagacgaaatcctccccacaaatgcagggaggaaacagaggtgaatcagatgccgacgctaaccgtctccggcagtgtgctgccgccatcaatcacattctgtgtaccggttaaatagctggattcatccgatgcgaggaaggccgccagttcgccgacttccagcggatcggcgaggcgacgcatcgggattgctttcgccatttcagtcagcaccgattctggatcttccgggttcgactggcgggcaatgctttccgccattggcgtgcgaacgtatccagggcagatggcgttaacgcgaataccagactgcgcgtactccaccgccagcgatttagtcaggccaacaatcgccgctttcgttaaggcgtacgccgtttcgcccgggtctgccaccatatcgccagtgactgaagacatcatcacaatccggccatctttgcgggcaatcatctccggcagcaccgccttcgtgacgttccatacgccttttatattgatatcaatatggaaatcgcgatcttcatcgctcatatcaaggaaactgcccagacgacaaacgcctgcgttattcaccagaatatcaatgcgcccttctttttccttagcgcgcttaatagctgcggctaccgacgccgggtcacgcacatcggcgacaaccgccgtacagcgatgaccacggccacacagttcgtccgccagcttttcgatctcaggggagatatccagcaagattaggtttgcgccatgacgcgcaaaagttctggcaattccttcgccaattccctgcaatgcgcccgtaatcagtgctgtcttgcccgtgagtttacccattttaatgctctccttgttaatacagagcgttacactccattccctctgaaaatacaggataaacaaaatattgctgcggatcagctcactaattaaggaaaatctcaatttagtcgctgctttatgcagcacctcaagcgttacgtcagcgcgcaatcattttcagtgacatcacatgagtaatattcggacttaatgattcctttgtgtctatcaaatcgggatatatgatcccatttatctgcaattatttgatcgcaaatattaaggtcaccaccgatgcaacttgaaaagatgattaccgaaggctcgaacgccgcctcagctgaaattgaccgcgtatcaacgctggaaatgtgccggattatcaacgatgaagataaaaccgtaccactcgccgttgagcgcgtactgccggatatcgccgcggcgatcgatgttatccacacccaggtaagcggcggcggccgtctgatttatctcggtgcgggaacatccggtcgtctggggattctggatgccagcgaatgtccgccgacctacggcgtgaaaccgggcctggtagttggtttgattgctggcggcgaatatgccattcagcacgcggtggaaggcgcagaagatagccgggaaggtggtgttaatgatctgaaaaatatcggcttaaccgcgcaggatgtggtggttggtattgcggccagcggacgcacgccgtatgtgattgccgggctggaatacgcgcgccaactcggctgccgtacagtgggcatttcctgtaatccggggagtgccgtttcatccaccgcagagtttgctattacgccggtagttggtgccgaagttgttaccggttcttcgcgaatgaaagcaggcacggcgcagaaactggtgctcaacatgctctccaccgggctgatgattaaatccggcaaagtgttcggcaacctgatggtcgatgtggtcgccaccaacgaaaaactgcatgtgcgccaggtcaatatcgtcaaaaacgctaccggatgtaatgccgaacaagcggaagcggcgttaattgcttgcgagcgcaactgtaaaacggccattgtgatggtactgaaaaatctcgatgccgatgaagctaaaaaatgcctggatcaacacggcggttttattcgcaaggctctggaaaaggaataacccatggctaaagagatcagcagtgaacttctgaacaccattcttacccgggtcggcggaccgggaaatatcgccagttgtggtaactgtatgacgcgcctgcgtctgggtgtacatgacagttcattggttgatcccgatatcaaaacgctggaaggcgtgaagggcgtcattttgaccagcgatcaggtgcaggtggtttttgggccaggcaaagcgcatcgtgccgcaaaagccatgagcgagctgctgggcgaggcaccggtacaggatgccgcagaaatcgccgcccagaataaacgccagttaaaagccagacaaacttccggcgtgcaacaatttctcgccaaattcgccaccatcttcacgccgctgatccccggttttattgccgccggtctgctgctggggatagcgacgttaattgccacggtgatgcacgttacggcagatgctcagggcacgctacccgatgcgctgaattttatgaaggtgttcagcaaaggcctgttcaccttcctggtcattctggtgggctataacgcggcccaggcatttggtggcacgggcgtaaatggcgcaattatcgctgcgctctttttgcttggttataacccaactgcaaccacgggttactacgccggatttcacgatttctttggtctgcccatcgatccgcgcggcaatattatcggcgtgttgatcgccgcgtgggcctgcgcccgcatcgaatgcatggtgcgccgctttatgccggacgacctcgacatgctgttgacctcattaatcaccctgctgatcaccgctacgcttgcgtacctgatcattatgccgctgggcggctggctgtttgaaggcatgtcgtggctgtttatgcacctgaacagtaatccgctcggttgtgcggttttagccgggctgttcctgatcgccgtggtatttggcgtgcatcagggctttattcctgtttatctggcgttaatggacagccagggattcaacagcttatttcccatcctttcaatggcaggcgcaggccaggtgggcgcggcgctggcgctctactggcgggcgcaaccgcacagtgcattacgcagtcaggtccgcggggcgattattcccggtctgcttggcgttggcgaaccgctgatttacggtgtcaccctgccccgcatgaaaccgtttgttaccgcctgtttaggcggcgcggcgggcggtttgtttatcggcctgatagcctggtggggtctgccgatgggcttaaacagcgccttcgggccgtctggtctggtggcgctgccgctgatgacttccgcgcaaggcatccttccggcaatggcggtttacgctggcggtattctggtggcatgggttagtgggtttattttcaccacactctttggctgccgtaacgtcaatctggactgattatgaaacggacaatgctctatctttctctgctggctattagctgtagcgtcagcgccgcaaaataccctgttctgacagaaagtagttgatcaagtgtatgcggcgttaaagcagtaataaaaaggccagtcagttgtgttactggctggcctttaatcaatgaatcagaaacgcttacagcgccatcagcttgtccagcgacggtgcgaagtaatagccgccagtgaccggtttggtgaaacgcaacatcgcatcacgcttaccatcagtatcgccaaacatgctcagcaattgctgctcaatgttatgcagacgcgcgcagtaggcgcagaagtacagaccgtgagtgccactggcggtgccgtacggcaggctctgacgaacaatcttcagccctttgccatcttctttcagatcaacgcgggtcaggtgagaggtttccggacgttcgtcgccgtcaatctcttcgttggcctctttggtgcgcccgatcatcatctcttgatcgtgaacgctcatccgattgagctgcttcaggttgtgctcccaacgctgcacaaacacatagctgccgcccgcatccacgccgtctttgataacagccacttcgcggcgcgtctcttcacccgccgggttttctgtaccgtcaacaaagccgctcaggtcacgctcttcaacccaacggaagccgtggatctcttctttcacttcaatgcagtcaccaaaggcttccatcgccgcctgagcgacagagaagttcacgtcgtgacgcagagaaagaatgtggatcaacacatcgaactgggtcgtcggtgcaagacctttaccgtagcccggaaaatctttcagctcttcagccccaacgccgccgctcagagtgcgccaggtattgttaccaaaggcaaccaccgcaccaagatgcgcgtccgggaatttcgcttcaaaagttgccagtttgtcggcaaatgttttactggccgcacgcagggcgtcaacttcccctttcacgttggcttcgatccaaatcgccgcgcggcaatgttctggcaaaatgccactctgaacctgagacattgttcctcctgaaaataataatgccacgcaatccgtggcattgttgggcgctattttacgtgttttttcgcggcggcggtttgttcagacgcaaattaacgccgccagataattttactgactttccagtttttcagggtatcgtccgaaggcattaacccttcaggaccactccattccccgctgaactggtagctaatatgttgactgccttcggctttacattcgacggcacgattatcatcactgtcggccttttggcaattgccaaatgctttgctgtaaaggtcactaaacggtgtaccgattttaacaccggtgtcagcaggaatatcgctatccagcacatcaatgcggctgatcgtgccttgatcgccgttaatcaccatcgccacgttgtcgcctttcatcacttcaaaaaagcgcaccacgttgccgttcgcggttttcattccgctgcgcaggcgataatcgccatcaagcgcatcagcaatggcttgttcttgcagtggtgtggacgccgttaattcacccacgccctgctcgctcactttggtggatgatccaaaccagttccacgggttagcggccgaccagttaactgacgacatcgtggaacagccggtcagcatcaacggcatagcgcataacattaaacgcagcgatttcatgtcacttcctttggttattcaataacgttgattggagtgcaaattcaccaaaaagtgccgttattctttttcttcattaaaacaagcgcgtaaacgtcgattggtcagcagccagattaacgccacgatatccgccactaccagcgccagaccgataccgctaacggattcaccgttcagccacagccacggttgccaacaaagtaaaaccacttgcgccaacagcaacagaaaatagagcacatgccagatacggggaaatgaagcccgccgaccactcagcaaaaatgccagcaccgccggaataccgggaatcaaccccagccagaaattatcgtgatcgggataaaacagatttagcagcgcagtaccctgctcgcgcgacgctccggcaatgacaaacagcacccaggttcgcgcctgaagcaatagcacaagccagaagagcaagggtaaacgcaggcgaccgtgcgcatcataatggacaggatgaaactcagtactcttcatcttcaatcaaacgcttacccagactcagcacgtcggcgtgttcatatcccaggcgttcatacattccgagcaccatgtcgttatcttccggcacgttgatctgaattttcggacagccgcgagcaatcagctttttctccagccgattaagcaacgcattagcaatcccacgcccacgaaactcgggatgcacgccaagataataagcagacccgcgatgcccgtcataaccgcccatcaccgttccgaccacttcaccgttcacctcagcgaccagaaacaaactgacgtcatggttcatcttacgctcaatgtccatttccggatcgttccacggacgcagcaagtcgcaacgctcccaaagggtgatgacctcttcgaaatcttcctggcgaaatacgcgtatctccatggtattcgttacctttttgcgggttaaaaggctgattatggcgtgaacggtcgaattagccaatatctgacgaaaatcggttgaaaaagtggcataatggggagttgtcaactattgaaatgaaaagtaaaacaattctcaacagcaaaccgtcgtaacggattacgcgatacgatataacatctggaactttattattacaactcaggccgtatgagcacttttaaaccactaaaaacactcacttcgcgccgccaggtgctgaaagccggtttggctgccctgacgttatcaggaatgtcgcaagccatcgccaaagaagaaccgttaaaaaccagtaacggacacagcaagccgaaagcaaaaaaatctggtggcaaacgtgtcgttgttctcgatccaggccacggcgggattgataccggagcgatcggacgcaacggttcgaaagaaaaacatgtggtgctggcaattgccaagaatgtccgttccatattgcgtaatcatggcattgatgcgcgtttaacgcgttctggcgatacgtttatcccactgtacgatcgcgtggaaatcgcccataaacacggcgcagacctgtttatgtcaattcacgccgacggttttaccaacccgaaagctgccggtgcttcggtatttgccctctctaaccgtggggcaagtagcgcaatggcgaaatacctgtctgaacgcgaaaaccgcgccgatgaagttgccggtaaaaaagcgactgacaaggatcacctattgcagcaagtgctgtttgatctggtgcaaaccgatactattaaaaacagcctgacgctcggctcgcatattctgaaaaagattaagccggtgcataaactgcacagccgcaataccgaacaagccgcgtttgtggtgttgaaatcgccgtcggttccgtcggtgctggtggaaacctcgtttatcaccaacccggaagaagagcggctgttaggcactgcagcgtttcgccagaaaatcgccacagcgattgccgaaggcgtgatcagttatttccactggtttgacaaccagaaagcacactcgagaaagcggtaagtgatgaaacccgacgcacaccaggttaaacagtttctgctcaaccttcaggatacgatttgtcagcagttgagcgccgtcgatggcgcagaatttgtcgaagatagctggcagcgcgaagctggcggcggcgggcgtagtcgggttttgcgtaatggtggtgttttcgaacaggcaggcgtcaacttttcacatgtccacggtgaggcgatgcctgcttccgccaccgctcatcgtccggaacttgccgggcgcagtttcgaggcgatgggcgtttcactggtagtgcatccgcataatccgtatgtccccaccagccacgcgaatgtgcgcttttttattgccgaaaagccgggtgcagagcccgtctggtggtttggcggcggcttcgatttaacccctttctatggttttgaagaagacgccattcactggcaccgcaccgcccgtgacctgtgcctgccatttggcgaagacgtttatccgcgttacaaaaagtggtgcgacgaatacttctacctcaaacatcgtaacgaacagcgcggcattggcgggctgttctttgatgatctgaacacgccagatttcgaccactgttttgcctttatgcaggcggtaggcaaaggctacaccgacgcttatttaccaattgtagagcgacgaaaagcgatggcctacggcgagcgcgagcgcaattttcagctctaccgtcgcggtcgttatgtcgagttcaatctggtctgggatcgcggcacgctgtttggcctgcaaactggcgggcgcaccgagtcgatcctgatgtcaatgccgccactggtacgctgggagtatgattatcagccaaaagatggcagcccggaagcggctttaagtgagtttattaaggtcagggattgggtgtaactccctcacccccactcccgcatccgctgatgcagcgtcagtgacggcttctcggcaaacagttgctgataatccgtggcaaattgcccaagatgccagaatccccactgcatggcggcgtcttttaccgttgtgctttgtgaccacggacttatgagttcgcggcgcacggcgttcaggcgaatacgtttcagccacgcgttcggaccaatgcccaaaatggcgtgaaacgcgttttgtagcgtgcggcggctgacatgcagttgattacacaagtccagcaccgtcaccggttcggacatgttttccagcacatattcacgggcgcgggaaagcaatcgacggtaactctgatgactgatgctttccgccgtcatcatcggctgcgcttcttccagcatcgcccccatcgccattagcaaattatcccccagcacttttcgcactgcaggctgatggagattttccgggttctcgcaaaacgtcgccagcgcctgttggacaaagccccacagcgcggctttatgctgctctttcacttccagcgccgactggctacgcagcatatgtaatacccgatccggattatgcaaaaagttagcctgacgagtgatgacatcttcagaaagcactacgccaaggatcgtgtaatcgtccggcgtacttaattcaaactcggttccaccagggcgcgtcgcaatttctgcacttcccagacattgcgaaccgataaatccctgctcaccgcgcgtcgccggaatgccaaaccagaacgagttcggccagaccaggcacgactgacgcagcgccagaccagtgtattcacgaaaaacctgaatatcatcgagtagaatttccgtaaattcaccatgaaacttgcccggatgcagctgatcgtaaatctgctgccaggcggtaattgtcaaagcatgttcatagacgtccgttgtctgtcgttgatgaacattatccacttcgaccttcggcgtgagcttcaggttttcgggtaagggttcatgataaagatggtgcaaattggctgtacgggtctttttcatgatgttaatgccgggtgttgtaggacacccggcacctccgacaggttaatggggcttgagacggtaacgactactgcgtttacgtaacgtcccggcagaaaagagctgttcgagcgcatttctggctttttccagcggccagccaaagtgggcagccacttctcctgccgtcattccctgacgtactgatgttaacagcgccaacaactcgtcagcagattccgcgacgataactggcgcgtcgggttcctttacgggttgcttcggctggcggttaaagccagtaagcagccactgggtgtcatcgtctggccgaccgatctccttacggctgatgacacgcccggtacgcatcgcggcagcacaacctgcgtccagcgccgcacgacacgccgccagatcgccttccaccaccagcgttaggcgaccagggtcaagcacttcgtgactgagcagacgaacgttagctgctttgagcatggcatcagctgcatctatcgcggcgaccatgccgtccacttccagcaatcccagtgcattgatcatcggcaacctccgttacgcacgctggattggattacgcgcgatttccagcactgcatcggtaaaggcgttacaggctgctttacacgcggcctggctaccggttaaaaatgctgccgagtagttggtttcagacggtggcgggacataggtcaccagctgcacgtcggcagatttcaacgctgcatcaatgccgtaggtcgcttccagcggcggtgccaccagatacgccatcggatcgccaagcgtgatcccggcggttgatgagagataagaaccggtacgcgaaactacatgtgccaggaaggctgtgttttctgcgtcattagcccactggaaagcagcgccattttcaatatttgcaaccatcgcatccagaccagcacgcacttccgccgggtttggtccaccaagcataatcagcacctcaccggcagtcggtgacgggccgtgtgcagcgcccgcatacagcgagcgaccatataccacttcgaccatcgcctgcttggtcgcttcgtcagccgcaatgtaggtgacgtcatctgaatcagcagaaatcagcccgaggctacgaatatgcggcggcaatttcagttcacgtgcaaattcggcgttaacggaggcaatcacccgcatggcggttaccgacggtcgaatcaaatctaaagctggcatgatgcctccttatcgggtcatgttgatgccggatgctttctgctccagcatacgtttcgccaaatccacaatgacggctgcggcttcaaccggcggcgtgccgccctggtgaatattagagatacaggtgcgatcggcctcaacggtggtcgccatacgcggcgagtaaacggcgtagcaggagaggctttctgactgccccaaccccggacgttcgcccaccagcaggatcactactttcgcgcctaggatctcaccgatctgatcttcaatcttcacgcgaccataacgtacaaagaatggcgtaccgactttcagcccggcttgcttcaggcccgccatcagcggcggcaggatctcttcgtagttcacggtgatcgcatcagttgacaggccatcagaaataacgacctgcacgtccggattagcaacacactgtgctttcagcgcttcaacagcttctgcacacaggcggcggcccatatccggacgagtcaggtagagatttttgtcgctgatttcggagcggacttccagcaagccctgcgctttcacccactcttccggtacttctttcagaacggtatctttcgaacgagagtgatcggccaggaaacgcagcaacgcctgggtgcgcggacgcggaccggcacgaccggtacaaacgcgggccacggtgctgcgacgcagttctgttaatacgtccgcgcgatgtgggttttccacaccaatccacgcttttgcttccgcagaacctaaatccagcgcgcagctttccgaggtcaccggtgccgcacagttggtggtggcgcactttgcttctgacggcgcgggggccgtttgtcccattgacgccatcacactgcgtacaatttcttcaatctgtttttgatccatgatgtgttatctccgcgtcatcagaagaacagtgacggatcgcccgcccgtttggtcaggcgaccgtttgccataatgcccatgctttccagccagcgttcaaactccggtgacggacgcagattcagtaactgacgcacagtggcagtgtcgtggaatgcggtggtctgatagttgagcatgatgtcatcacccagcggcatccccatgatgtagttgcagcctgcggtggcgagcaggatcatcaggttttcgttgaggttctggtcagcgtcagcgtggttggtgtagcagcagtcacagcccatagagatgccgctcagcttgcccataaagtgatcttctaagcccgcacggataatctggcggtcgttgtagagatactccggcccaataaaaccgaccacggtgttgacgataaacggatcgtaatgacgcgccagcccatagttacgcgcttccatcgtcacctggtctgcgccgaagttagcgccagcggatagcgccgagccttgtccggtttcgaagtagagacagttttccccggcgatacggttgaactccgcgcccactgcgcgtgcttcatcgagcatcgccagctctacgccaaactctttcagccctttttcgctgccgcagatactctggaaaatcagcccgcctggtgcgccacgacggatcgcttcgatctgggtggtgacgtgcgccagtacgcagccctgagttgggatgttgaatttgtcgatcacgccatagatggtatccaacacgcggcttaagttttccacgtcgtcagtcaccgggttaacgccaatcaccgcatcgcccaccccaaaggaaagcccttcgtagatttgcgcggcgatactttgcacgtcgtcacgggtatcgttcggctgcaaacgggcgctaaaggtgcccggaataccgatggtggtattggcctttttgatcaccggcattttcttcgcgccgtagatcaggtccgcgttggagcaaatcttcgctaccgccgccaccacttccgaggtcagccctttgcgggtaaaggcaatgtcgtccacgctgatttcatcgctcagcacatactcacgcagttcgctgatgctccagtttttaatctggttataggccgtttcgttaacgtcgtcctgaatcagccgcgtcacgcagtcatcttcataggcaatcaccggattattgcggatgtccgctacggtcatttccgacaacacctgctttgccgccacgcgctcctgtgaacttgccgcagcaacgcccgccagcacatcccccgaacgcagttcgttggctttagccagcacctcttttacatccttaaactgatatacattgccgaacaatgtggtctttagtttcataagtcgttccctcaggaaggaaatgcgagtgatttcaccgtcaccggcacaaccgatccgccaaaaagaggcgtaccaatgtcgatatagtcccccgcgcggacaatcacttcgtcaatgactgccaacgggagttgttgtagctgtgggcgcaacaacatgcccagagctttaccaaagtcctgcccggccaccaccagcaggggatgcggattcggaaaacgcgcgacgaaatcgaccagcgcgttgatgaccgtcagtaccgcggcgtaacgcacaggcagcgaggcgggaagcgccagcacgtacgcgtcagttttggggcaaagatccagttgaatcagcgcctgttgccaggcactgaccagatccgtttcatcaatcgggatcgccaccggcaaattgcgcagcggcagttgtacgccctccagccagattgtgctgccagagagcgaaagggtatgagcacccgcgccaatcaccgtggcgcgcacggtttgcgccggaaactgcacgttcatctcacgcagacgcggatggtcatgcagcgccgttgccagaagcgggcctatatcggcaaaacagaacgggtcggcgggctggtggcgataacattcgcctaccccgccagaaagcgtaatgatttcgggcgtaacacctgcgggcagcaaatcggtttgcatcaatgcctgcgcgagcggcgagagcgttccgtcaatcacttcgacaatcagctctgccatccggcgggtaacctgcaccagctgcccgccggtcagcgaacgggcgtcagtaccggcaccgaagcactcatccacaatcatctgccccggtttatgagcgtaaaccacgcgcccctggctgtcggtttccagcaggcgaccgccgacgttgaggcaggcagtgccgctgatttttccggcatcgaacagggcgtagttcgcggtgccaccgccgatatcgatattcagtacccgacacagccgttgttcagaaagggtttgcgccccggcaccgtgtccggcgatcacggattcaagatgcggcccggcgctggcgacgacaaaatcgcccagcgaccgggagagcgccatcaccgccgggcgagcgttgcgggtttttgcgctttcaccggtgataatgatggcaccagaatcaacgctttccggcgcaatgcccgcagcctgatattgctcgaggattaaggttttcagttccgcttcttttaaaccaccctgtttatcgacaggggtaaagaacaccgggctttgccagctaatttcgcgtttgatgaattcgtagcgcggcacctgcgacaccgccgcacggttaaccagctccaggtgggagaagatcacctgggtggtggtggtgccgatatcgataccgacgctcagtagctggcgagtgttcacgattgcgcctccgcttcagttttagccgcggtcgcgtcttcttttggcaccagcatcatcgccacgccaattgccgttacgccgccgatcaatttgccgacaatcatcgggaagatcatggcgttcatgttggcagcggcgaagcctaaatggtcgcccagggcgaaagcagcggaaacggcgaaggcgcagttgatgactttgccgcgggtatccatctgcttcatcatgccaaacatcggaatgttgttggcaagcgttgccaccatgccggctgccgcgatattgttcatattcagcaccttaccgacgctcatcagcggtttttcaaaccagcgagtcagcagcagtaccattggatacgcccctaacagaacgcaggagatcgagccgataacttcaatggcgcgcatcacttcaccgggtttatcgccaggggccataaagataggatcaagacccgggatcagttcccagccaaggaggaatttcactaccgcagcggcaagaccgagggtgatcaatgcaacgaggaatttggcgaagatctggaagccgttgatcattttttccgggatgaatttcagccccagcgccaccagcaccgcaacgataagtaccgggatcatgttcatcaggatcagcgcaaaggtgaattcaacaggctggccgttgatctgcacaccggagtacatcgctaccagaccaccagcgatacagccaatcggaatggtcactatgcccgccagcacgccgagcgccagataacgacggtcagaaggttcgataatgccgagcgccactggaatggaaaacacaatcgttggccccatcatcgacccgaggattaacccagagtatagccacgctgctacgtcaccgcccgccagctctttggcgaggaagaagccgcccatatcgcacgccagcagtgttccggcgaacattgacgggtttgcgccgagcatttcgtaaaccgggataatcaccggcccgagtacgtgggccagtaccggtgccagcgcggtcataccgaccatcgccaggcccagagcgcccattgccataaagccttcttcaaactggccgccggccccttcgatacttttgccgaacttaccgaggaaacgagcagaaccgccgaactgcgacaggatcctgtctacggcagctatcagcataaagaacatcatgatgtacatgatgatttcgttaattcccatcgcctttactccctgttagttgttatttattggcggatgcggcgtgaacgccttatccgccctacatgtgcaatcccgtaggccagataagacgcggcaagcgtcgcatccggcaattgcaccgcgccactggcggatgcggcgtgaacgccttatccgccctacatgtgcaatcccgtaggccggataagacgcggcaagcgtcgcatccggcatttattgcgccgctgcgtacaggccgacaatctgctccaggctggcggtacgcgggttactgcgcagacaaatatcttccagcgcggcctgcgcccatgcgccgtaatgcgcagatgtcgcaccaacatcgcccagtcgtttaccaatcccaacttcagcaatcagctcacttaccgcgttaatagcgtcacgatcgtcggattttttagttcgcagcgcccgaccaatctgactaaaccgatcacgacaaaccatccggttaaattccatcaccgttggcaacaacatggcgttcgccagaccgtgcggaatatgcagcgccgcccctggctgatgcgccatcgcgtggcataacccaagcccggcgctggaaaacgccattcccgccatacatgaagccagcaacatgctctcgcgcgcggcaaggtcatggccgtagcccaccgctttcggcagtgatttgccaatcatcgcaatggcaccaatcgccaggctgtcggtaaacggtgtagcgttcagcgcgctgtacgcttcaatggcatgggttaacgcatcaatgccagtcatcgccgtgacatgcgacggcacgccttcggtcagcgcagcgtcgagaatcgcgacatccggcatcagcgaggcatgggctaacacctgtttgcgcccgcttaccgcatcgataatcaccgtcacgttagtcgtttcagagccggttccggcggtcgttggaatggcaatcaacggcaggcgcggttgcaggacgctggtttctgacatttctgccagcgtgctatcggggttcgtcaccagcaacgcaacggctttcgccgcatccagcaccgagccgccgccaaacgcgatcaccccgtcacaacctgattcacgcaactgcgccacggctgcacacacgtcggtgatgcacggttcgcccaccggacatggccagagcgtcatggcgatacctttaacggccaggctacgtgtcagcccggcggtcatccctgcctgatgcaaaaagctgtctgccatcacgaacagatgtttcaacccacgcgtttgcgcttgctgcccacaactgctcaccgcgcccggaccgcaaagcgtcaccggtggaacgctaaatgtttttacccgttgcagattcagggtatcgaacgcctgaaaaagcgccgtttgcaattcactttgcatagatcccctccgctttctctcgcccactactggcgattgccagcggggtcataaacaaactgtgctgcggtaaatgcacctgtaacgccggaaattgtttgcaaaacagcgcagctacgcccggttgcatacaggaaccgcccgccagccataaatccgtaatgccctgcccttcaatatgccgggccacaatgtccgccattttttcgtacaccggtttcaccgcgggccaaatctcgtcaccgtgaccgcgtttgtactgctctgcctcttccagcgaaatacggcgatttccggcgagagtcagagagatgtgatgtccgccggtggcttcatccgccgagtacgtcaccttgccctttttcacgatggcaataccagtagtgccaccgccgatatccactacaccggcgttgtccagttgcagcagatccgcgactgcggttggctcatccagcacatggctcacttccagtccggcagactccagcacgttgatggaaatacgcgggtccgtacctggaggaaaagaggtcgccgcatggctaaaacggcgaccgaattgctgctcgagggtgtcgagatggcgtcgaacaatggtgaccgcaccgaagaaatcccagacgatgccgtcgcggaccacatcagcccagtcgaggcataccgccaccggctgaccgtcgcggtcgacaaccatcgacaccacatcgcaagtgcccagatccacccccagccacagcggagattccgtcgcggcaggcgtctggttacacagcgttgccgccgtttgcagacgtggggtgagccattgttcatcgtgcgccatcggttactccttaaacaatgcgaaacgcatcgactaatacacagcgacgcagacggacaaacgtccgcgcgctggttaccccttcaccggttggcgtggtgatggtcatcgtggtccagccttccccgcccagccccagcccggcaatacacggtccgttcttaacgaaaatgctggtatcaatggcgttcgccatctggttcatgttttcgatattgcgcgagtgcattgccgccgtgtggtggcaaccgccttccagtttcaccgccagcgcaatggcatccgccacgttggcgacgcgcacgacgggcagcaccggcatcatcagttcggtcacggcaaacggatgttctgcggtggtttctacaaacagcagtcgcgtttctgacgggacgttcaggccgattgccgccgcgattttcgccgcatcgcgaccaacccagtcacggctgacggtgccttttccgcgctcgtcgatatttttcagcaacaccgattgcagttgctgcgcctgctctgcggtcagtttcaccgcatgctggccttccatcagacgcatcagttcatcggctacgctatcaacaacaatcagtaccttttcgtcggcacaaatgatgttgttatcgaaagaagcgcctttgacgatggactgagcagcacgggcgaggtcggcggtttcatccaccactaccggcgggttaccggcacctgccgcaatcaggcgtttattggtgtgtttgcgcgccgcttccactaccgcttcgccgccggtcaccaccagcaggccgatacccggaaacttgaataagcgttgcgcggtttcgatatccggatttgctacggtaaccagtaagttttccggcccgcctgcggcaacaatcgcctggttgagcagcgtgatcgcccgctgggagacttttttcgccgccggatgcggggcaaaaatgacgctgttgcccgcggcaatcaggctgatggcgttgttaattacggttgccgccgggttagtggaaggcgtcaccgaagccaccacgccccagggtgcgttttcaattagggtcaggccgttgtcgccagtcagcacttgcggagagaggcactcaacgcctggtgtgccgcgcgcctgagcgacgtttttggcaaatttatcttcaacgcgccccatgccggtttcactgacggcaagttccgctaaatctctggcgtgtttttcgcctgcttcacgaatggcagcaatggctaactggcgcattgccacgctttttaacccttgctgggcgactttggctgccgcaacggcgtcatccagggacgcgaaaacgcccatctcatgaacggcggcgggcggcgtgtcactgctttgcattttcagcagtaccgctttcaccacctgttcaatatcctgttgattcatgatgttctgccttatttgtggaaaatgacctgaccgccagacaccacctcatcgacgatgccaatcacgcacagatcgaccggtgacgtttcgcttttatgcgcctggcgggcggaactgccactcaccagtaacacccactccccggttcccgcgccaatattgtcgatggcgacggcgcattgcccgtcaggattaccttgtggatcaatcatttccaccatcagcaatttgtcatgcgccagtccgtgatggcgtacggtacaaacaatttgtccagtgacgactgccagtttcatacccgcctccgtggcgtatttcaggtaaaagctccccctaccctccgcggaaggtaaaatgaaaaaggagagagcgtgacgcccgaatcgacgtcacacagggtgattacaggttgctgctatcgcctttcaggccgatcgggaagacttcttccaggtcgccgtgcggacgcgggataacgtgtacagataccagctcgccgatacgctgtgccgctgcggcacctgcatcggtcgcggctttacaggctgcaacatcaccacgaaccatggcagtacacaggccgccgccaatctgcttaacaccaaccagcttgacgcgcgcagctttaaccatcgcgtcagaagcctcaatcagtgcaaccaggccccgggtttcgatcattcctaatgcttccattgtgctttcctctttatcagggtccagaacgggaccgttcattcaaccagtgtttgtaaactgctttcgcggttcacttctgtctgacgcggcacagctgccaccagcgccagttcgataatttcctgcacgctacaaccacgagagagatcgtgcatcggcgcggcaagtccttgtatcaatggcccgacggcacgatatccgccaagtcgttgtgcgattttgtagccaatatttccggcttccagcgacggaaaaaccatcacattagctttgccctgtaacgggctggcaggcgctttttgcgccgccacttccggcacgaaggcggcgtcaaactgcaactcgccatcgacaaccagctttggtgcgcgctcacggacgatttctgtcgcctgctggacgttggcaacgcaggggtgacgggcactaccgttactggaaaacgacagcatcgccacgcgcggttcttctccggtgatggcgcgccaggtttcggcgctggcaagcgcgatatccgccagttgtgccgccgtcggctgcggcaccacgctgcaatcggcaaagcccaacgccggaccgctgtactgtggcagcatcaggaaaatggatgagagcgttttacagcctggctgcaagccgataatgcgtaatccggcacgcagcacattcgccgtggaagagaggttgcccgcgatacagacatccgctttaccggcgctgaccattgcggcggcgaacatcagcggatcggtaagtttttccagcgcatccggcggcgttttttcgcccgcgcgggccagccagcgatgagcaaattcttcccgcattgcgaggttgccatgcggatctatcacctgtagcccgtccatcgccacgccgtgactgagcgcaaactgacgaagttcaaacggattggcgaccagaatgggcgttgccagaccttgttgatgtaaatattgcgcagctttcagcacacgttgatctaacgcatccggaaaaactactctggcgggcgctcgcaacgccagttcacgacaacgtttaataatcattgcgtttcccccagtcgttgttggatctgcttcaccgttagcggctgcttcgttacgctcaggatcatcatcacgtagaccgtgctggaaaggcggttcagcgcctgcaaaatgtccgggcgtaatacttcaaagctgcgggtgataaagacctgcgccgctacggtttcggtttcccgcactttggtgcgtaacagattcagcaacgccgcatcgcgcccgtggctggcttccggcaccagatgatcgtggtcgagataacgcagcggctggtgagaaagccgatgcagatcttcgtcagaaagcccgacaatcgcctgacagcccaacggttcccccagcgcatcggcacgcataatgttgccaagacgcgaacggatatccgccagccacggctgccacggttccgccagttcaatttgcagccacactgccagcgcaatggtgctgtcgagaacagcgcgaaaacccagacgcggatcgcttttggcgaccattttttccgccgacaggtgagtcagcgtatccggcttttttgctaccggctggcggcacagttcgcagcacgcctgcggatgttcatcgctactggtcagcccgtgaacgggctgcggctgctgctgttcatcgtcaacaaacaggcggccctgctcgtcaataaacttgatgcgcagatggcggctttccagtaactcccgggcagagggcgtcaggcgactgtccgcagggagatggatctctgcgccttcgctgagcgtatggttcgctcttagccatgcttcggtgatgaaatctttcatagggattgccagttagccggccaggcgacatacaggaatttcacgctggatgtcgtaccaaattcgatgctggagcctttcgggataaacatcacatcgcccgctttggcgatcatagtttcgccttcatggcgaacatgcagctccccttccagcaccatgtcgatttcgtcgtagttcagggtccacggaaagaaggcgttctcccactgcatgaaaccagcggccatactgctgccgtcgtctccggtcacgagatcagtcaagcctacgcagtgcggttgtgcgccgtcgaaacgaccaaacttgacgctgctgccatcaataactttgatgccgcctttgccggtcaccgatttaaagctcggctgcagtgcaccctgttccagcgactgtttttccttcatcactttttccatcagctgcgcgaccaggctttcggtaaactgaccttccggcagttgggcgataatggtttcacggatgcgctggctttcggttttatcggctgatgcgctggcgggaacagacgccgttaccgggatcgattcatcacattcggtgatggtaaaacccaacagatcagccacttcacgggcttccggggtaataatgctggcgcgcagaaccacggacattgccagtttgccgcgcgcgtgtgcttcacgaatatcattcgctgtgatgagttttttcacctgcttcctcctgtttggtgagagatgccagataatccaccagttgctgcacgctttgcgggtcgtggctgtttagctcgaaaatcggctcttcgaagcccgtctcaagcaataactttcgcgttgcggcgacgtcagcatctggcatgtccgttttactgatgacggcgatttgccgtttgctgacgccaatatccagcaacccggcaggcaaccgactttccgggtcattcgcgccgtggacatagatcagcatgtccacatcctgtagcgtggtaattaaggcgtgataccagcggggatggctaaaatattcacccggcgtatcaatatcgccattatcattaaattccacggcctgtgtttttcttgcgagggtataattcccctgcaacgcattaaataacgttgtttttcctgccccgacggtccccacaaacgcaattcgtttcatgaatgcctcgtattaacttttggtcatttcacaaagcgtataatttaataagcgtcctaaaccactgacggtttgtgataacgcttcttctactgcgcccaccgagccataaatcaccagcgcgccactaaaacgatcgagaaaaccgatatgcacatcggcggctttcaacgctaaatcaccggcgatcatcgccgtttctccgggagttagcgtcataatgccgattgcgcccgcatccggaacgccgattttcttcgccagttcctcgccgggatgcgcgatgagatgcgccagtgtgacctgtttaccgggcacaaattcctgaatgatgcgttctttatccatgagtcgccgcctgtgaaaaactttcgtgtatcgtgacaatttttcgtcagagtaaataacaaaattcggcaagcgcgtttaaaaggtgaggtagatcactaagaatggagagatatttgctgtggtgcataaactttcatatgcaacgcatgaatataaataaaataatatcgaaatattttatatactgatttttttattattcgcaaactcagtaataaactttactaatatattgcagctaaaccgcttaccctgaatattcagggtaagcgtgagagttaaaaaagaattacagcggttgggtttgcgcttcaaccacggccagcgccaccatgttgacgatacgacgtaccgatgcgatcggcgttaacacgtgaaccggtttcgccacccccatcagcaccgggccgacagtcacaccttccgagctggaaacgcgcagtaagttgtaactaatgcgggcagcttccatgttcggcatcaccagaatattagcggaacctttcaaagggctgtccggcatacggtcgttgcgaatcgcttccaccagcgctgcatcgccgtgcatttcaccatcaatcatcagttctggcgcacgttccctgaccagttccagcgcctgacgcattttgctcgacgacgggcagtcagaagaaccaaagttggagtgcgacaacagagccacacgcggctcaataccaaaacgacgaacagtttctgccgccatcaaggtgatctccgccagctcttctgcatcaggctcatcattgacgtaggtatcggcaataaaggtgttaccactcggcaacagcagcgcgttcattgcacctgcggtgtgaacgccatcgcgataaccaaagacatttttcaccacgctaaagtgttcatgataatcgcccaccgtaccgcaaatcattgcatcggcttcgccacgctgaaccatgatcgcgccgatcactgtcgggttactgatcagcgcacgctgcgcctgctcctgagtgacaccgcgacgcttcatgatctggaagtattcggtccagtactctttaaagcgcggatcggattcgttattgacgatctcaaaatcaacgcccgacttgatctgcaagcccagtttctgaatgcgcatttcgatcacgttcggacgaccaataaggatcggtttcgccagtcccagcgttaccagttcctgagtggcatgcagaacgcgcgcctcttccccttccggcagaactacgcgcttcggcgctttgcgagcctgggagaaaatcggcttcataaacaggttagttttgtaaacgaactctgtcagcttgtcgatgtagacgtcgaaatcagcaatcggacgcgtcgccacgcccgactccatcgccgctttcgccaccgcaggagcgatcttaacgatcaagcgcggatcaaacggttttggaatgatgtattccggaccaaagctcagatcctgatcgccatacgctgaagccaccacttcactctgttccgcatgggccagttctgcaatcgcgcgtactgccgccagtttcatctcttcgttgatggcggttgcgccaacgtccagcgcgccacggaagataaacgggaagcaaaggacgttgttcacctggttcgggtagtcggaacggccggtacagatgatggcatccggacgcacttctttcgccagcggcggcagaatttccggttccgggttcgccagcgccaggatcattggcgcacgggccattttcttcaccatttcctgggtcagcactttcgggccggaacagccgaggaaaatatccgcgccttcaatcacatcatcgagggtacgtttaccgtcatccaccaccgcgtatgcggctttggtttccgccatgtttggctcacggccctgatagataacgccttttgaatcgcaaaccacgatgttatgtttttgcagacccagcgctaccagcaggttcatacaggcgattgctgcggcacccgcgccagaaaccaccatccgcacgtcggagatgtttttctccaccacgcgcaagccgttgaggatggcggcagtgctgataattgccgtgccgtgctgatcgtcgtggaataccggaatattcatccgctcgcgcagtttctgttcaatatagaaacattctggcgctttaatgtcttcgaggttgatgccgccgaaggtcggttcgagcgcagcgacgacttcaataaatttgtccgggtcgagttcatcaacttcaatgtcaaatacatcaatcccggcgaatttcttaaacagaacgcccttgccttccatcaccggtttgcctgccagcgcgccaatgttgcctaaccccagcaccgccgtaccgttagagatcaccgctaccaggttaccgcgcgcggtatatttgtaggcttttaacgggtctttttcgatttcaagacaaggtgcggcaacgcctggtgagtaggccagcgccagatcgcgctgcgttgccagaggcttggttggagaaacctggattttccctggaactggaaattcatggaaatcaagtgcactttgttttaactggtcatccatttggttgttcctttcacgtaacgttcacaaataaagtgtgtgggcaacagcccctgtccacaacgtggcgcacattattaccctgccggagtctacagactttgagcaagtccaaactctcaccattaatataatgttttggtaataatcatataacactgatgttacctgcttaatccagcaataccatgcctgtctgctatgcttttttgatgcgtttagcgaaatttctcagaagtgtgaattaacgcactcatctaacactttacttttcaaggagtatttcctatgaacgagttagacggcatcaaacagttcaccactgtcgtggcagacagcggcgatattgagtccattcgccattatcatccccaggatgccaccaccaatccttcgctgttactcaaggctgccggattatcacaatatgagcatttaatagacgatgctatcgcctggggtaaaaaaaatggcaagacccaggaacaacaggtggtcgcagcgtgtgacaaactggcggtcaatttcggtgctgaaattctcaaaatcgtacccggtcgcgtgtcaacagaagttgatgcacgcctctcttttgataaagaaaagagtattgagaaggcgcgccatctggtggacttgtatcagcaacaaggcgttgagaaatcgcgcattctgatcaagctggcttcgacctgggaaggaattcgcgcggcagaagagctggaaaaagaaggtatcaactgcaacctgacgctgctgttttcttttgcacaggcgcgggcctgtgcagaagcaggcgtttttctgatttcgccgtttgtcgggcgtatttatgactggtatcaggcacgcaagccgatggacccgtatgtggtggaagaagatccaggcgttaaatcagtacgcaatatctacgactactataagcaacaccactatgaaaccattgtgatgggcgcgagcttccgtcgcaccgaacaaatcctcgccttaaccggctgcgaccgactgactatcgcaccgaatttgctgaaggagctacaggaaaaagtttcgccagtggtacgtaaattaatcccaccttctcagacgttcccacgcccagctcccatgagcgaagcggagttccgttgggagcacaatcaggatgcgatggcggtagaaaaactgtctgaaggcattcgtctgttcgccgttgatcaacgcaaactggaagatcttcttgccgccaaactataaaccagccacggagtgttatatgtcccgaaaagaccttgccaatgcgattcgtgcactcagtatggatgcggtacaaaaagccaattctggtcatcccggcgcgccgatgggcatggctgatattgccgaagtgctgtggaacgattttcttaaacataaccccaccgacccaacctggtatgaccgtgaccgctttattctttccaacggtcacgcgtcgatgctgctctacagtttgctgcatctgaccggttacgacctgccactggaagaactgaagaacttccgtcagttgcattcgaaaacccctggtcacccggaaatcggctatacgccaggtgttgaaaccaccaccggtcctcttggacaaggtttggcgaacgccgtcgggctggcgatagcagagcgtacgctggcggcgcaatttaatcagccggatcatgaaattgtcgatcacttcacctatgtgtttatgggcgacggctgcctgatggaaggtatctctcacgaagtctgttcgctggcgggcacgctggggctgggcaagctgattggtttttacgatcacaacggtatttccatcgacggtgaaaccgaaggctggtttaccgacgatacggcaaaacgttttgaagcctatcactggcatgtgatccatgaaatcgacggccacgatccgcaggcggtgaaggaagcgatccttgaagcgcaaagcgtgaaagataagccgtcgctgattatctgccgtacggtgattggctttggttcgccgaataaagcaggtaaggaagaggcgcacggcgcaccgctgggggaagaagaagtagctctggcacggcaaaaactgggctggcaccatccgccatttgagatccctaaagagatttatcacgcctgggatgcccgtgaaaaaggcgaaaaagcgcagcagagctggaatgagaagtttgccgcctataaaaaggctcatccgcaactggcagaagagtttacccgtcggatgagcggcggtttgccgaaggactgggagaaaacgactcagaaatatatcaatgagttgcaggcgaatccggcgaaaatcgctacccgtaaggcttcgcaaaatacgcttaacgcttacgggccgatgctgcctgagttgctcggcggttcggcggatctggctcccagcaacctgaccatctggaaaggttctgtttcgctgaaggaagatccggcgggcaactacattcactacggggtgcgtgaatttggtatgaccgctatcgccaacggcatcgcgcaccacggcggctttgtgccgtataccgcgacgttcctgatgtttgttgaatacgcccgtaacgccgcgcggatggcggcactgatgaaagcgcggcagattatggtttatacccacgactcaattggtctgggcgaagatggtccgacgcaccaggctgttgagcaactggctagtctgcgcttaacgccaaatttcagcacctggcgaccgtgcgatcaggtggaagcggcggttggctggaagctggcggttgagcgccacaacggaccgacagcactgatcctctcaaggcagaatctggcacaggtagaacgaacaccggatcaggttaaagagattgctcgtggcggttatgtgctgaaagacagcggcggtaagccagatattattctgattgccaccggttcagagatggaaatcaccctgcaagcggcagagaaattagcgggagaaggtcgcaatgttcgcgtagtttccctgccctcgaccgatattttcgatgcccaggatgagaaatatcgggagtcggtactgccttcaaatgtttctgcccgcgtggcagtagaagcgggtattgccgattactggtacaaatatgttggcctgaaaggggcaattgtcgggatgacaggttatggggaatcagctccggcggataagctgttcccgttctttggctttaccgccgagaatattgtggcaaaagcgcataaggtactgggagtgaaaggtgcctgatggtgatcgcctgatgctgtatgttcccctcaccctaaccctctccccagaggggcgaggggacggtccgtgcgctttttaggggcgcatctgggattttgtttaacgggtgatccacaacgtgggccaggcgtctggcccatgccagttatcgcaggtgggttctgcggcgtaacgcaccaggcgaaaacgctgaccgtcaaagcgccagcgcgcctgaatgccacaatcgcttaatccgcgcccttttgctaaggtcaccagttcacgcgatttttcatcgaatgttgcgttcatcagttccagttcattggtctcctgaccgttgttgaacggcaaacgcaaccgtaccgggcgcgaggccagcggctttttacgcgacacaatccatgccaaatcaatggtgttataggccccagcctcacagctaatcatcatcagcgctttatcatcggtcagcgcagtgacattcacctcacgacgtaacggatcaagcgaacagcgcagaccattcatccgccagtttccataatccagcaaatcgttacgttcttcgcgtgagagtggcgtcggcgttgggttaaccaccacgacctctttcagcgcaggcgctggcggtacgctgagcggcggttcgtcccctttctttatccacgcggtctcactgccaacgcgcttttgctgggcatcaataaacaacaacgccgcttttaagccactcagagaaatagtctgattgccgtcgcgtaaggtgatcgccctcccttcctgaatcatctgcaaaaacgcggtgatggttgccgtatcatcggttactaataaccatggtgaaatccgccacttgtcaccacttaacgccaacggctcaccatctaacagcagccgtggcgctatctccccttctgacgcatccggcgacttcaacccgccgcgctcaatacgtaaaacggcatcggtatgcgccccggcgctgcggctcagggtcatcaccagtccattatgatcgcccgtattgcgcgctacacagaaattttgattattacaggtgacctgccagtcggaaaacgcccgttgcgctggtgccgcccacaccaaagacatcggcaacaaaacgaaaaaaaagagaaggaaaatgcgatatcgcatggacggtacgaccccagaagttcaaacaaacagcacaagtcgtatcttcgttgcgcaggtagcgcggctcaatcggatttgtcggattgagccaataataaacaacgaaatattattgttatttttcagtccattaaatgtgacatttgcaaatagttaagcaataacaccgtcttaccgtcacgtatctcgccggttttaatcatctccagcgcctggctgaacggcagctcaagcacttcaatatcttcatcttcgacaccaccaccggcgttagcgcgctggctgtcactgtattcggcgataaaaaagtggattagctcagtcacaccgcctggcgacatatacagttcaaataatttgcggacttcgccaacttcatagcccgtctcttcaatcgcttccttgcgaatgcacacttccggttcgtcgttatccagcagcccggcgcaggtttcaatcagttgcccgctttcattgccattaacccaggtagcgacgcggaactggcgaatcagaaccacggtctttttcttcgcgttgtacaggaggatcgtcgcaccattaccgcgatcgtaaacttcacgtttatggcggataacttcgccatctttgcgcgtgagatcgtaagtaatgttgtgcagggtgaaatagttatcggagagaattttgtctttaacgagggtgatttgttgcgtcataccgactccacagcgcgaaatgaacaattatcttacgctgtgaagtcgggtttgtctgcgcaggctatcagtgagatttgactgattttacgcccagccagtcaatgatcccctgtgccgcatgacgtccttctgccattgcggtaaccaccagatccgcaccacgcacggcgtcaccaccggcgaagattttcggattcgtggtctggtaacggtactggctttccacatccgcgatgatgcggccccatttgtctaccgttacaccgtgcgactccagccacggcatcccgtgcggattgaagccaaacgccataatcaccgcatcggctggcatgacaaattcactgccttccaccggcactggacgccgacgtccctgggcgtccggctcgccaagacgcgtgcgcaggaaacgaatcctgcagacgtgaccttgttcattcagttcaagcgccaccggctggacgttaaattcgaagttggccccctcttcacgggcgttcttcacctctttcttcgagcctggcatgttagcttcatcacgacgataagcgcaggtgacgttactcgcgccgtggcgcagcgcagtacgcacacagtccatcgcggtgtcgccgccgcccagtaccacgacgttaagtccggcagtattgataaacggctcttccggtagctcttcgagtcccatcacctgtttagtattggcgatgaggaacggcagcgcgtcataaacgcccggcgcatcttcattgggtaaacccgctttcatggaacggtaagtgcctacgccaacgaagaccgcgtcgtattgttccaaaagcgaattcaaagagacatctttacccacttcacaattgagttcgaagtgaatccccatcgcgctgaagatttcccgacggcgtgccagcagggatttatccagtttgaaagaaggaatgccgaaagtgagcaagccaccgatttctggatggcgatcgtacaccgtcaccgccacgccattgcgggtgagaacatctgcacaggccagccctgccggacccgcaccgataatcgccacccgcttgtccactttggtgacatggcttaagtcaggacgccaacctttcgccaacgcctgatctgaaatgtagcgttcaatgttaccgatagttactgcgccgtgctcatcgcgaatagtacaggcaccttcacacaaacggtcttgcgggcaaacgcgtccggtaatttccggcagggtgttggtctggtgagaaagctcgacggcggcgtcgatgtttccggctttcaccagttcaatccactgcggtatatggttatgcagcgggcaggtccattcacaaacgctgtgctcgccgcacttaaggcagcgcgaggcttcccgttgtgcctgatcggcacggaatggcagataaatttcatcaaaaccggttttgcgcgcttcaatcgccagtttatctggctcgccacgcgcgggcgttgcctgcatttgctcgactttactcattaccggcatttcttgcgccgcggtactggcatgccacggttgatgttcctgacgtgcggtgcgcaagcggcgggatttcgccatgccggagagtgcggcgtcagtgaccagttgcagcgcgtccgccgggcaattttcgacacaggcaggaccgttttcgcgccctgcacaaaggtcgcatttatgcgccgtggcttttacttttcctaccgcaacgggtgtcagaacgatttgcatcgtaccaaatggacaggccaccacgcaggatttacagccaatacacttttgctgattgacctgaatgctgtcatcaacgtggctgattgcgccattagggcagctacgggcgcagggcgcatcttcacaatggtgacaggtcactgcactacgttgctgctgatgtttgataaccgtaattcggggatgaaaatggtgttggctcaggacatgttgctcgtcattgtgagccatgacacaggcgatttcacaagcatgacaacccagacattgctgactgttggccataataaaacgattcataacgaccttcttttttggttgtaaaaaccttattctttatatgagtgttgttattacccgacttacaggggaatcggcaatgttcatgtgcccagaataagtaactatttcgctataaactgtggcagatcaaataatcccatcactgactaaatttcgtttcagcgaactggaacattaatgattttttgtggagaagacgcgtgtgattgttaaacgacccgtctcggccagtctggcccgggcctttttttacattgtgctgctgtcgattctttccacgggtatcgctctgctaacgctggcgagcagtttacgcgacgctgaggctatcaatattgccggatcgctgcgtatgcagagttaccgcctgggctacgacttgcaaagtggcagtccacaactcaatgcacatcgtcagttatttcagcaggcactgcattcaccggtattaaccaatctcaacgtctggtatgtgccagaggcagtaaaaacccgctatgcgcatctgaatgccaactggctggagatgaataatcggctcagcaagggcgacttgccgtggtatcaggccaatattaataattatgttaatcagatagacctgttcgtgctggctttacagcactacgctgaacgcaaaatgctgctggtggtggcaatttccctggctggcggcatcggtattttcacgctggtcttttttactttgcgccgcatacgccatcaggtggttgccccgctgaatcagctggttaccgccagtcagcgtattgaacacgggcagttcgactcgccgccgctggataccagcctgccgaatgagcttggcctgcttgcaaaaacctttaaccagatgtcgagcgagctgcataaattgtaccgttcgctggaggcgtcagtagaagaaaagacccgcgatctccacgaggccaagcgtcgtctggaggtgttgtatcagtgttcgcaggcgctaaacaccagccagattgatgtgcattgtttccgccatattttgcagattgttcgcgacaatgaagcggctgaatatctggagttaaatgtcggtgacaactggcggattagcgaagggcagccaaacccggaattgccgatgcagattttaccggtgacaatgcaagagacggtttacggcgaactgcactggcaaaatagtcacgtttcatcatcagaaccgctgcttaacagcgtttcgtcgatgctgggacgcggtttgtactttaatcaggcgcagaagcattttcagcagttattgttgatggaagaacgtgcgaccatcgcccgcgaattgcacgactcgctggctcaggtactttcttacttacgtatccagttgacgttactgaagcgttcgataccggaagataacgccaccgcacaaagtatcatggccgatttttcccaggcgttgaatgatgcttatcggcagttacgcgagctgttgactactttccgcctgacgctgcagcaggcggatctcccctccgcgttgagggaaatgctggatacgttacaaaatcaaaccagcgccaaactgaccctcgactgccgtctgccaaccctggcgctggatgcgcaaatgcaggtgcatttgttgcaaattattcgcgaagcggtgctgaatgcgatgaagcacgccaacgccagcgaaatcgccgttagctgcgtcaccgcgccggatggcaatcacacagtctatattcgcgacaacgggattggcatcggtgaaccgaaagaacccgaaggccattatggtctgaatatcatgcgcgaacgcgcggaaagattgggtgggacgctgactttttcacaaccttccggcggcggcacgttagtgagtattagctttcgctctgcggagggtgaggaaagtcagctgatgtaatgcctcttattgaccaaagaatagtggcacttaaggttcagtataaaagggcatgataatttacattaactcctttttttctccacgattggctcgtaccttgccgctacagtgaagcaagccaagcctacaacgatacgcagaaacacgaggtcctcttttaatggcgaatttctttattgatcgccccatttttgcctgggtgctggcaatcctgttgtgtctgacaggtaccctggcgattttttcattgcccgttgaacaataccccgatctcgcgccaccgaatgtgcgagtgaccgctaactatcccggcgcatcggcccagacgctggaaaacaccgtgacccaggttatcgagcaaaatatgacgggcctcgataatctgatgtatatgtcatctcagagcagcggcaccggtcaggcatctgtcacgttaagttttaaagcaggcaccgatccggacgaagccgtgcagcaagtacaaaaccagctacaatcagccatgcgaaagttaccgcaggcggtgcaaaatcagggcgtgacggtgcgtaaaaccggcgatacaaacattctgaccattgccttcgtctctaccgatggttcgatggataaacaggatattgccgattatgttgccagtaatattcaggacccgttaagccgcgtgaatggcgtcggggatatcgatgcctatggttcgcaatattccatgcgtatctggctggacccggcgaaactcaacagtttccagatgacggctaaagatgtcaccgatgccattgaatcacagaacgcgcagattgcggttgggcaacttggtggtacgccttccgtcgataagcaggcgctcaacgccaccattaacgcccagtcactgctgcaaacaccagaacagttccgcgatatcaccttgcgggtgaatcaggacggctcagaggtaaggctgggcgatgtcgccaccgtcgaaatgggggcggagaaatacgattatcttagccgcttcaatggtaagccagcctccgggctgggggtaaaactggcctccggcgcgaacgaaatggcgacagcggagctggtgctcaatcgtctcgacgagctggcgcagtattttccacacggactggaatacaaggtggcgtatgaaaccacctcttttgtaaaagcctccattgaagacgtggtgaaaacgctgctggaagctatcgccctggttttcctcgttatgtatctgttcctgcaaaacttccgcgccacgctgatacccactatcgccgtgccggtggtgttgatgggaaccttctcggtgctttatgccttcggctatagcgtcaacaccttaaccatgttcgcgatggtgctggctatcggcctgttggtagatgacgccatcgtggtggtggaaaacgtcgaacgtattatgagtgaggaaggactcactcctcgcgaagccacacgtaaatcgatggggcaaatccagggcgcactggtcgggattgcgatggtgctttcggcggtatttgtgccaatgaccttcttcggcggcaccaccggggccatctatcgccagttctctattaccattgttgcggcgatggtgctgtcagtactggtagcgatgatcctcactccggctctgtgtgccacgctacttaagccactgaaaaaaggtgagcatcacgggcaaaaaggcttttttgcctggtttaaccagatgtttaaccgcaactccgaacgctacgaaaaaggggtggcgaaaattctccaccgtagcctgcgctggattgtgatttatgtcctgctgcttggcggcatggtgttcctgttcctgcgtttgccgacgtcgttcttaccgctggaagaccgtggcatgtttactacctcggtacagttgcccagcggttcaacccagcaacagaccctgaaagtcgttgagcaaatcgagaaatattacttcacccatgaaaaagacaacatcatgtcggtgtttgccaccgtgggttctggccctgggggtaacgggcaaaacgtggcgcgaatgtttatccgcctgaaagactggagcgaacgcgacagtaagaccggcacctcgtttgccattatcgagcgtgcaacgaaggcgtttaacaagattaaagaagctcgcgttatcgccagcagcccgccagcaattagcggtcttggtagttctgcgggttttgatatggagttgcaggaccacgctggggcaggtcacgatgcgctgatggcagcacgaaaccagttgctggcgctggcggcggaaaatccggagttaacccgtgtacgccataacggcctcgacgacagtccgcagttgcagattgatatcgatcagcgtaaagctcaggcgctgggcgttgctatcgacgatattaacgacacgctgcaaaccgcgtggggttcgagctatgtgaatgactttatggatcgcggtcgcgtgaagaaagtctatgtgcaggcagctgcgccgtatcgcatgctgccagatgacatcaatctctggtatgtccgaaataaagatggcggcatggtgcccttctctgctttcgcgacctcacgctgggagacaggctcgccgcgtctggaacgctataacggttattctgcggttgagattgttggggaagccgcaccgggggtcagtaccggtacggcgatggatattatggaatcgttagtgaagcagctgccaaacggctttggtctggagtggacggcgatgtcgtatcaggagcggctttccggcgcgcaggctccggcgctgtacgccatttccttgctggtggtattcctgtgtctggcggcattgtatgaaagctggtcggtgccgttctcggtaatgctggtcgtgccgctgggggttatcggcgcgctgctggcaacctggatgcgcgggctggaaaacgatgtttacttccaggtgggtctgttaacggtcattggtttatcggcgaaaaacgctatcctgatcgtcgagtttgctaacgagatgaaccaaaaaggccacgacctgtttgaagcgacgctccacgcctgccgtcagcgtttacgcccgattctgatgacctcgctggcatttatcttcggcgtattgccaatggcaaccagcacaggtgccggttccggtggtcagcatgcggtgggtactggcgtaatgggcgggatgatttcggccactattctggctatttacttcgtgccgctgttctttgtgctggtgcgccgccgcttcccgctgaagccgcgcccggaataagcaataaaaaaggcgacatgccaatgtgtcgcccttttcaactttccgattaagaacctgctcagcaggttcttgctgtttgtactttgtctcaggaattacttacgaagcataacttcgataaagtctttccagttccccagttcacgttcaatcataacaacctctcttataattatgggtattctacggaaacaatataccgtggtgaagctaatttactcgattgctgcgatgactacctccgggggacaaaccttatgtaaatactatggtcctgcggtgatgatttgtatgtgatacaccgcaacatttcgagatattcatacggcatctaatactgatttaattctggttaaaatacagacagataacaagatgaatattcttaatgtttacgttaaaaatgtttaatgttatttaatagttgttaatttgaatacttcgataatgttatatttcctgataatcatttgcaggcaaaatgttttcacctttaaatgagtatttattctcataaatcgaaaaaggattcattatggttacactttacggcatcaaaaattgtgacaccattaaaaaggctcgccgttggctggaagccaataacatcgactatcgttttcatgattaccgagtcgatggattggacaacgaattattgaacggttttatcaacgaattaggctgggaagcgttactcaacacccgtggtacaacctggcgtaaactggacgaaatcacccgcaataaaatcaccgatgcggcctctgcggcgacattaatgactgaaatgcctgcaattatcaaacgtccattgctctgcgcgcctggtaagcctatgctgctgggtttcagtgaatccagttatcagcaatttttccatgaggtgtagtctatgtcgtgcccggttattgagctgacacaacagcttattcgccgcccttccctgagtcctgatgacgcaggatgccaggctttgttgattgaacgtttgcaggcgatcggttttaccgttgaacgcatggactttgccgacacgcagaatttttgggcatggcgtgggcagggtgaaacgttagcctttgccgggcataccgacgtggtgccgcctggcgacgccgaccgttggatcaatccgccgtttgaaccaaccattcgtgacggcatgttattcgggcgcggtgcggcagatatgaaaggctcgctggcggcgatggtggtagctgcagaacgttttgtcgcacaacatcccaaccatacggggcgactggcatttctgatcacctctgatgaagaagccagtgcacacaatggtacggtaaaagtcgtcgaagcgttaatggcacgtaatgagcgtctcgattactgcctggttggcgaaccgtcgagtatcgaagtggtaggtgatgtggtgaaaaatggtcgtcgcggatcgttaacctgcaaccttaccattcatggcgttcaggggcatgttgcctacccacatctggctgacaatccggtacatcgcgcagcacctttcattaatgaattagtggctattgagtgggatcagggtaatgaattcttcccggcgaccagtatgcagattgccaatattcaggcgggaacgggcagtaacaacgttattccaggtgaactgtttgtgcagtttaacttccgctttagcaccgaactgacggatgagatgatcaaagcgcaggtgcttgccctgcttgaaaaacatcaactgcgctatacggtggattggtggctttccgggcagccatttttgaccgcgcgcggtaaactggtggatgcggtcgttaacgcggttgagcactataatgaaattaaaccgcagctactgaccacaggcggaacgtccgacgggcgctttattgcccgcatgggggcgcaggtggtggaactcgggccggtcaatgccacgattcataaaattaatgaatgtgtgaacgctgccgacctgcagctacttgcccgtatgtatcaacgtatcatggaacagctcgtcgcctgatgagtggttctgcaagaggaaataagcatggactggctggctaaatattggtggattctggtgattgtctttttggtaggcgtcctgctgaacgtgattaaagatctcaagcgcgtcgaccataagaaatttctcgccaacaagccggagcttcccccgcatcgtgatttcaacgataagtgggacgatgacgacgactggccgaaaaaggatcaaccgaagaagtaagctaagtggccggataaggcgttaacgccgcatccggccatgatgcctgatacagtcttatcaggcctacccggctattattacatcatttcaatcacatcatcatcgccaggcttaccgccacttagcgcttcgtcgaaataatgtttcggaatggtataacgcaagtgatccagggctaattgcatactgcgattgtcgatcgcatggcctaaatcctccacgatatccagcgtcacatcgccaccggcactgattaacgcttcctgcgccgcaaccgcatgcgccagatcgataaccggatcttcaccgccatgaatcaagtgaattgttgtggctgtagacgcagtttccggcaggctcgcatagcgtccgttaaaggcaatgacgcgtgaggcaaggcccggttcggctttaatgctctccagcgccataatcgcgccttgagagaaaccgattagcgccgtggcgttagcccctactccgctctgtttctgccagtagcgcaccgtttcaataaacgtcggcatgatggcatccacacgcgcctggcgattatcttccgtaataccctgcaccgaaaaccactgacgccccgccggattaccgctcggctccgcgccaccgacactcaccaccagcgcatcaggaaacagcggcgcaaaccagctacctatttcccccattgccaccgggttatccccgacaccgtggaaaagcagtaacaactgttgtgctggtttatccgggctttgaacaacaaaatggtcatgtttcatggcgaactccttaactgatgtcattaattttacgccgctgactcacaatgaccatgggagaaaattgaaggagtcagtgaaaaaattgccattgcgttatgcgatcgcgcagacgctcagtgcgaacatcatcaagtgcgaatagcgcctgcgcggcctcttcccgctggcgaaccagtaacagcttacggcctgaaagtttaagtgtggtacataactgcgcgtcactggcgtttttctgtaaacgcccacgcagcgccggtaatgccagttcgctggtttgtagcaaacgcaataagcaacctaacgatgttaatagcggacgatgagtgaaagcaaaaccggccagttcaagccagtcgtcgtcagaaaggacggcatcgtttagtggatcaacaggaagcatttcgccattccactgcgcgagagcttgcgcatcgcgacgtaaacggtaatgctcacgttcagccagttgtttacccgcatcactcatcggtaacagcgccatcgccgtatagcaaccgctgctggcttcacgatgattacccattcgcaccagcacaaaaccgcagcgttgccagaaacgccataactcctcggtgtaaccaaaactcaccgaaagatagtcgaggtcatgaatatattgcaaagcaccagcaataagctgtcgccctgtgccttcccgctgacgagccggatgaactgctatccggctaacccgccgtccgcgcaatgtcgccgccagtggattgctgccgtgcgccgccagcgattgagccaccagattgccccgtggacgacgataacccgcccataccgcctgactgagttcttgagataatccaccctcatccaccagacacagcgctccggcaatctcgttttcgccagccgcctgtaaaaaatgttgacctggtgcatccatcatgcggcgtaaatccagcggcgaagtccggtagtgcgcaccagacaataattgataaacctttaacggcgtttctggctcgcttcgccataacgtctgttcaaatgcggaaataacgatattgccttgtggtgtatgggtgaagttttcatcgtcaaacaccagtgcctcactaaccattttttccagcgggcatccctgcgcccaacggatcggctgttgtagttcaaaacggtgtaaatgcggaaagcgagcgcaaaatttcagcaaaaaaccacgtccggtgccttcgtagccctgcaccgtagtggttaacaacgttcgaggaaaacgcgataccagttgatgcaacaacggcgcaggtatagctgcggcttcatcgaccaccagccaatcggcttgctcatcgctggctaacaaggcatccggtgcaataaagcgaaacttctcgcccgcaaattgtgccagtacatccgttgccgcttttgcgggcgcggtgacaatcgcactgcccgcaatacgagaaatgagttgccctgccaacgccgacttaccgcgcccacgcgcagcagttaccgctgccacgcccggcggcatggtcagtaactgctgtaagagttgctgttgttctggttgtggtgcgccggtagcggggtgccagtcagtacggggagtaaaatgcgccaacgagaacggctggttttgccgccagaggatagcgtcgttattcgccgtaagtacacgtttgaggtgcaggacaaaatgcggcgtcgcaatagggtcagggcaatcactccagcgcagcgagtcggcatcaggttggttttcccactcatcccatacagggagtaacaacaccagccagcttcccgctttcaacgttccgctaagtgccgcaaaggcagcggcatcaaagccgtagcgggcgtcgaataccgcatgccggaactcgcgcccaagtaaagtttgtagtgccgagggagaacagtggttttcagcatctggctgcggcgaaatccacagccagtcgccaggtaaggcatcacgcaacttaagcgcatgatcaaaacaccaacgctcttccccgctcaacaccagcaagcggcggatcccttcaagtttcatttgcgctgttaatgtgtgaagcgcagtcagttcagccatccctgccccggaagttaaatgcttttaccaaaagtattgcattgtgccggatcgccgctgtcgaaaccacgtttaaaccagctgtagcgttgctgagaagtgccatgagtgaaactgtctggtactactcgcccctgactttgctgttgtaaacggtcatcgccgatggcctgcgccgcgttcagcgcctcttccagatcgccggtttccagaacaccttgctgctgcatactatgcccccagacaccggcaaaacagtcggcctggagttccatacgcacagataagcggtttacttccgcctgcgtcgcgttttgttgcagttgacgaactttcggctcgatgcctaacagtttctgcacatgatgaccgacttcatgagcgataacgtacccctgggcaaaatcgccatccgcgccaagtttgtctttcatgtcatcatagaaggagagatcgatataaactgtgccatccgccgggcaatagaatggccccattatggactggcccgccccgcagccggtacgcgtcattccacggtacatgaccagcttcggttgctgataggttttacccatcttctcgaattgctgtccccaggtgtcttccgtggttgccagaatcaccgaggtgaattttgcggcttcgtcttcattagggctaattgaccgcgttgattgctgttgggaaaccggctgtccggtcatcaacccggttaaatcaacgccatagtagcctgcaaccagcacgactatcagtaaaatcagcccgcctttaccgcttggcaggcgaaaaccgggaccgcccattgacggaccgccggagctattgcgcctgtcttcaacattgtcactttcacgtcgcccttgccaacgcatagatacctcaacattatattcattatagaaatgatcgtaggtggatcagaggaagattaccacaggaaagcgggatgaaatggcggaggaatgagcgttcaatactcatcttatgagagcggttgtcttgccgtgccagcagcacggcaagatgatgaatagaaaaatcagtccagctgtacacccaggcggcgggcaacggcttcataggcttcgatcaggccaccgaggctctggcggaaacggtctttgtccattttctccagcgtttctttgtcccacaggcggctgccgtccggggagaactcatcgcccagtaccacttcacctttgtacagaccaaactccagcttgaagtcgaccagaatcagaccagcatcatcgaacagttttttcagcacgtcgttcgctttgtaggtcagctctttcatacgcgccaggttctctttgctcacccagccaaaggtttcgcagtaagattcgttgaccatcggatcgtgcatggcgtcgtttttcaggaacagatcgaacagtggcgggttcagctcaataccttcttcgattccaagacgtttcaccagagagccagcagcacggttacgcacgacacactcaaccggcaccatatccagctttttcaccagacattcggtatcggagagcagacgctccatttgagtcgggatacccgcttcagccagtttgctcataatgaagtagttgaacttgttgttcaccatacctttgcgatcaaactgctcaatgcgcgcgccatcccctgctgacgtatcattgcggaattcgagcaccaacaggtccgggttttccgtgctgtatacggttttcgctttaccacgatacaactcagcttgcttttgcatctttatcactcctgggtgtgaattaacgttttaaaatcttttgctgtctggtgtgccggatgttttatcggatgcggcgtgaacgccttatccgacctacgtccgacaaacaaatttcgtgcgaattaccgctaaaatcgcgtttttctgtcgacgcacacgtttgcgtatcatatcagaaaaaagggccggatgactccagccctgtatttttacttgctaaacgcagcctggaagacagctaccagcgcgtcgttctgactctgagtcagagtatgacctttcggatcgatgaactgtaggctgctgcggttatctaaatcgccaacctgcagtttatagtcaccggatgccagacctggatcgctcgcgcccagttcgtgccattcgctgtcagacagcggcttataagttacggccatgttgccctgcgaacgggtgctgtcggtcactttcatgcccactttttccagcgcagctggcagacgttgccaaaccacattgaacggcccgcgtacgaccagcattggtaaaccggtgtcatcagctgcactttgtacgtccatagtggtggaggcacggttttgcgcagcgttcgcggcgtcagtggcagatttatccagaccggcggaaataacgttcatcatctccgtgctgtaacgctgcatggaagccgcgtctgcaaccggtttgcccgcctgttccaggttcagcagtttaaccgtaaccgcctgctgataaccctgcggcttaacagagatttgataacgaccacgatactgctcgtcttcgtccagacggttccattgtacccaatcggtggtcagtgtctgaccagcatcatcacgttgggtgatggtgtagtttttcgcctgcagcacgctaaccacctgcggccacagagtattgccacgaccattttccaccagcaatgaagcggtatcgcccgtgaactgggtacgcgcgccagaaaccagtgccagcggctgggctggtggacgaatgtccagcgccttaccgacggcaccactaccgttggtcaccgggattgcataatcgccggaggtcaccggcaagatcattccagccggggcatgaagctccgcaagcggtgccgcttccaggtaggcttcatcaccactgacctgacgcttatagcgtgagtcagaactacaggcagcgagtaataaaacaagcgaaacacccgcaacctttgccaggcgcgacttttgaacagagtaagccatcaaatctccctaaactttacagcaaaccggcatgcttaagcgccgctctgaccgtctcacgaccactgtcggtgattggtgtcattggcaggcgcagcgtatcggtcgccacaagacccagttccttacatgcccatttcaccgggattggattgggttcgacaaatagtttgttgtgtaatggcatcagacgctgattaataacgcgtgcctcggcaaaatgcccttctgctgccagtttgcacatctgggccatatcacgcgctgcgacgttagccgtaacggaaataaccccatgaccgcctaattgcatgaagtccagcgcgctcgcatcatcgccgctcagcagaacaaaatcatctgaaaccagctctttgatctggtttacacgcgttaagttccctgttgcctctttgattccgataatattttttactttcgccagacggcccaccgtttccgggagcagatcgcagccagtacgggacggcacattatacagaatttgcggcaggtcagtatgttcagcgatggctttgaaatgctgatacaaaccttcttgcgacggacgattgtagtaaggggttaccgtcaggcagccgacgataccgctgtcattgaagcgctgcgtcaggctaatggcttccgcagtagcgttagcaccggtcccggcaatcaccggaatgcgcccgtcagccagctccagcgtcatcatcaccacatcagcatgttcgtcatgatttaaggtagcggactcgccagtggtgccaacagaaacgatcgccgaagtaccgctggcgacatgataatcaatcagttttttcaagctagcccgacagacattacctttttcatccatcggagtaacaatcgcgacaatacttcccgtgaacatgggccatcctctgtgcaaacaagtgtctcaatggtacgtttggtatggcattaaaagcaagcagacagaaccgttctgattgttgtatgcatgttttttttatgctttccttaagaacaactcaccccttgaaggaataaccagtttgacactgtcatcgcaacattatctggtgatcactgcgttgggtgccgatcgccctggaatagtgaacaccatcacccgtcatgtcagtagttgcggctgtaatattgaagacagtcgcctggcgatgctgggagaagagttcacgtttatcatgctgctttccggttcatggaatgccattactctgattgaatcaacgttaccgttgaaaggtgccgagctggatcttttaatcgtgatgaagcgcacgacggcgcgtccgcgtccgccaatgccagcatctgtctgggttcaggtcgatgtggcagactccccgcatttaattgaacgcttcacagcacttttcgacacgcatcatatgaacattgcggagctggtgtcgcgcacgcaacctgctgaaaatgaaagggctgcgcagttgcatattcagataactgcccacagccccgcatctgcggacgcagcaaatattgagcaagcgttcaaagccctatgtacagaactcaatgcacaaggcagtattaacgtcgtcaattattcccaacatgatgaacaggatggagttaagtaatgaatccactgaaagccggtgatatcgcaccgaaatttagcttgccggatcaagacggagaacaagttaatttgaccgacttccagggacagcgtgttctggtttatttctacccgaaagccatgacccccggctgtaccgtacaggcctgcggcttacgcgataacatggatgagttgaaaaaagcgggcgttgatgtgctgggtatcagcaccgataaacccgaaaaactctcccgttttgcggaaaaagagctgcttaactttacgctcctgtctgatgaggaccaccaggtgtgcgaacaattcggcgtctggggtgaaaagtccttcatgggcaaaacctacgatggtattcatcgcatcagcttcctgattgacgctgatggcaaaatcgaacatgtttttgacgatttcaaaaccagcaatcaccacgacgttgtgctgaactggctgaaagaacacgcctgattactttgctccattccgtgctggctgcgcttgcggccagcacatctcaaatcttctcactgccctgcaacactcgtttcaaattttttcgctgaaggtcagtcttgcgcgatttgcccatcaggccaggcgtgaatcacggctttgatcagcgtcgccaatggaatagcgaagaatacgccccagaatccccacaaaccaccgaagatcaccaccgataaaataatcaccagaggatgcaggttaaccgcttcggaaaacaacaccggtactaacaggttgccgtccagcgcctgaataatcagatacaccgcgaagcagctccagaattccgtgccagcaccaaactggaatagcgccacgccaaccaccggaatggtcaccacaaatgcgccaatgtacggaataagtaccgagaagccgaccagcaccgccagcagcagcgaataattcagcccaaagagcaagaaccccagccaggtggcgatccctaccacgatcatctccagcactttgccgcggatatagttggtgatttgttgattcatctccttccacacctgtcctgccagtccacggttgcgcggcagcacccggcgaacggcgttcagcatctgctctttgtctttcagcaggaagaagaccatcaatggtaccagcaccagatagacggcaatggtcagcaaaccgaccaacgaggcgagggaaattttcaccaccgagtcccccatactgagcatccggctacgcatattttcagccattgcatcaataatccccgcatccattaatgccggatagcggcgcggtaacgtggcagcaaaatcagaaagtttattaagcatccctggcatatcgcggattaagtagatgccctgctgccaggcgataggcagtaccacgaacgccatcagtagcaggatgcccacaaacaggatcagcacgatagatgtcgcccaagggcgggaacagccaatagactgcaggcggacagtcggccattccagcaaataggccagaacaatagccaccagcaacggcgcgagtaggccgctaaagaaaaagataatgccaaaaccagcaaccaaaataaccagcaaggcaatcgcttccgggtcgctaaaacggcggcgataccattgcatcaacatttcgagcatacagaccttccctgaacctcaagagcgggattgcgatccgcaattgtatcgaaatgtcacaaaaaagacttcgctttttatgacggattcaggaaactgaaaagtcatttgagtgggctaatcttcgccgttacactcaaaggcggcgcggtgggaacgatatttcacagtatcggtcaaatgactatctccagaaatacaggatagaggttatgttcaggcagttgaaaaaaaacctggttgcaaccctcattgctgctatgaccattggtcaggtagccccggcgtttgccgacagcgcagacaccttgccggatatgggaacctccgcaggaagcacactttccattggtcaggaaatgcagatgggcgactattatgtccgccagttacgcggcagcgcgccgttaattaatgatccgctgttaacgcaatacattaattcgctaggaatgcgtctggtttcgcatgccaattcggttaagacaccgtttcatttctttctgatcaacaacgacgaaattaacgcctttgctttctttggcggcaacgtggtgctgcactctgccctgttccgttattccgataacgaaagtcaactggcttcagttatggcgcacgaaatctcccacgtcacccaacgtcacctggcgcgagcgatggaagatcagcagcgcagcgcgccgctgacctgggtcggcgcgttaggttctattttactggcgatggccagtccgcaggcggggatggcggcgctgaccggtacactggcgggaacgcgccaggggatgatcagtttcacccagcaaaatgaacaggaagcggaccgcattggtattcaggtgctgcaacgctcgggattcgatccgcaggcgatgccgaccttcctcgaaaaattactcgatcaggcgcgttactcttcgcgcccgccagaaattctgctcactcacccactaccggaaagccgtctggctgatgcccgtaaccgtgccaatcagatgcgcccgatagtggtgcaatcgtcagaagatttctatctggcaaaagtgcgcacactggggatgtacaattcagggcgtaaccaactcaccagtgatttgctggatgaatgggcgaaaggaaacgttcgtcagcaacgagcggcgcaatatggtcgtgctttacaggcgatggaagccaataaatacgacgaggcgcgtaaaacgctgcaaccgttactggcggcagaacctggcaacgcatggtatctcgatctggctaccgatatcgatcttgggcaaaacaaagccaatgacgctatcaatcgcctgaaaaatgcccgcgatttgcgcaccaatccggtgttgcagctcaacctggcgaacgcttatctgcaaggggggcaaccacaggaagcggccaatattctgaatcgctacacttttaacaataaagatgacagcaacggctgggatttactggcacaggcggaagccgcactaaataaccgcgatcaggaactggctgcgcgagcagaaggttatgcgctcgccgggcgactcgatcaggctatttccttgttgagtagcgccagttcgcaggtgaaattaggcagcctgcaacaagcgcgttacgatgcgcgcatcgaccagttgcgccagctgcaggaacgctttaagccttataccaagatgtaattcgcattaaaggaagaacaatgaccaaacaggtaaaaatctaccataacccacgctgttcaaagagccgggaaacgctgaacctgctgaaagaaaacggcgtggagccagaagtggtgctctaccttgagacacccgccgatgcggcaacgctgcgtgatttgctgaaaatgctggggatgaatagcgctcgtgaattgatgcgccaaaaagaggatctttataaagaactgaacctggctgacagttcgcttagcgaagaggtgctgattcaggcgatggtagagaatccgaagctaatggaacgcccgattgtggtcgcgaatggcaaagcgcggattggtcgtccaccggagcaggtactggaaatcgtgggttaagatgtgctccatcgctagttgaagcacattgccggatgcgacgcttgccgcgtcttatccggcctacgaatactatggattaacttcgcgtaggtcggataaggcgttcgcgccgcatccgacaataaacaccttatctacaacttcagaatttctttcacaaacggaatggtcagcttgcgttgcgcggtaatcgacgcacgatccagctgatccagcgtcataaacaacgtgcgcatttctctgtcgagccgcttcagcaagaaacgccccacatcttccggcagttcaaaaccacgcaaacgcgcgcgtaactgtagcgcctgcaacttatcttcatcagaaagtggctgcaatttgtagatctgcccccagtcgagacgcgacgcgagatccggtaatcccagattcaactgccgcggtggacgatcgccggtgatcaacaaccgtgttttgcccgattccagaattcgattgtagagatcgaaaatcgccatctcccacaactcatcgccggcaatacactcaatgttgtcaatacagaccagcgacaaatgctccataccgtcgagcacttccggaacaaaccaggtacgtttatccagcgggacatagcccaccgcatcgccacgctgcgacaattccgcgcaagccgcgtgcagcagatggctgcgccccgcgccttcgcgtgcccagagatagatgtaaccgctatgttcctgacgcagcacgttttgcagcgcggccagtaaagaggagttatcccccggccagaaacttgcaaaggtttcgtcgtcaggaagataaagtggcaaagagagctgtgccggtgtgttcagagatacctcaaccaggatttcacaaaatcgcgagaagtttaccacagaatcccatgatgtttgaaccgggcagcaacactgcccggtcggtacattatttgtctgttatatccgcgtcttctgcgtccagcaccacttcttcagggcgcagcatactaatcagtttgaagatcaaacttaagccgataccgacgatggtcgccagcgccatacctttcagctccgccgcgccaatgtttaccttcgcgccactgacgccgatgatcaaaataacggaagtcaggatcaggttctgtgctttgttgtaatccactttcgattcgatcaacacacgaataccggaagcaccgatgacaccgtaaagcagcagcgaaacgccgcccatcaccggcaatggaatcatctggatagcagcagccagtttaccgacgcaggaaagcaggatagcgaaaatcgccgcaccgccgataacccaggtactgtaaacacgggtgatcgccatcacgccaatgttttctccgtatgtggtgtttggcgtggagccaaagaagccggagatcacggtcgacaagccgttagcaaacatcgaacggtgcagacctggatcgcgcagcagatcttttttgacgatattagccgttacgaccaggtgccctacgtgttcggcaataaccactaacgccgctggcagaatagtcagaatggcaaaccactcgaagcgcggcgtatagagggtcggcagcgcaaaccagtgagcattaataatcggcgtggtatcgacaattcccattgcgaaagagagcgcgtaccccaccagcacgccaattaaaatcgggataattgccaggaaaccacgaaacagcacggaacctaaaaccgtgaccgccagggtggtaatagagatgatgatggttttggagtctggcgtttgcccttcagccgggagtaaacccgccataccggcagctacgcccgccagctccagaccgatgacggcaacgattgcgcccattgccgcaggtggaaacagcacgtccagccagccggtccccgctttcttcacgataaaagaaaccaggcagaacagcacgccgcacataataaagccgcccagcgcgacttcataccctaacggcaacagtaacaataccggtgaaataaaggcaaagctggaaccaagataagccggaattttccctttacagatgaagagatacagcagtgttcctataccgttaaataacagtacagtcgccgggttaatatgaaataagacgggcaccaggacggttgcaccaaacatggcgaacaaatgttgcaaactaagcgggattgtctgtaaaagtggcggtctttcactcaccccgatagcacggcgcgtcatagtattatcctctgtattatgtgttataggcgctttactcaaaaaaaagccgactcttaaagtcggctttaattatttttattctttatttcgtaccaaagattttgtcaccggcatcgccgaggcccggaataatgtatccgtgctcgttcagtccctggtcaatcgatgcagtatacagttcgacgtccgggtgcgctttttccagcgcagcgataccttctggtgcagctaccagcaccagaactttgatgctgctgcagcccgcttttttcagcaggtcgatggtcgcgataacggaaccaccggttgccagcattgggtcaacgatcagcgccatacgctcatcgatgttagaaaccagtttctggaagtacggtaccggctccagcgtttcttcattacggtacataccgacgacactgatgcgcgcactcggaacgttttccagcacaccgtccatcatcccaagacccgcacgcagaattggcacaacggtaattttcttacctttgatctggtcgatttctaccgggccgttccagccttcgatagtgactttttccgtttcgaggtcggcggtcgcttcgtaagtcagcaggctacccacttcggaagcgagttcgcgaaagcgcttggtgctgatatcttgctcacgcatcagtcccagcttgtgtttgacgagtgggtgtttgacttccacgatcttcatactctttctcctttgaggggcagccacaaaaaaaatcgacggattatacctcctttcttcaaggcggcaatattattttcgttgactttagtcaaaacgataacggttttagataaagttattttatattcaaatggttatgaaagaagattattccatccgaaaacgatcctttgccctggtacaagtattctttcgccgcgcgcctggggaaaagacgtgcaaaaaggttgtgtaaagcagtctcgcaaacgtttgctttccctgttagaattgcggcgaattttatttttctaccgcaagtaacgcgtggggacccaagcagtgaccgataaaacctctcttagctacaaagatgccggtgttgatattgacgcgggtaatgctctggttggaagaatcaaaggcgtagtgaagaaaacgcgtcgtccggaagtgatgggcggtctgggcggcttcggtgcgctgtgtgcattgccgcaaaaatatcgtgaacctgtgctggtttccggcactgacggcgtaggtaccaagctgcgtctggcgatggacttaaaacgtcacgacaccattggtattgatctggtcgccatgtgcgttaatgacctggtggtgcaaggtgcggaaccgctgtttttcctcgactattacgcaaccggaaaactggatgttgataccgcttcagcggtgatcagcggcatcgcggaaggttgtctgcaatcgggctgttcactggtgggtggcgaaacggcagaaatgccggggatgtatcacggtgaagattacgatgtcgctggtttctgcgttggcgtggtagaaaaatcagaaatcattgacggatctaaagtcagcgacggcgatgtgctgattgcactcggctccagcggtccgcactcgaacggctattcgctggtgcgcaaaattcttgaagtcagcggttgtgatccgcaaaccaccgaacttgatggtaagccattagccgatcatctgctggcaccgacccgcatttacgtgaagtcagtgctggagttgattgaaaaggtcgatgtgcatgccattgcgcacctgaccggcggcggcttctgggaaaacattccgcgcgtattgccagataatacccaggcagtgattgatgaatcttcctggcagtggccggaagtgttcaactggctgcaaacggcaggtaacgttgagcgccatgaaatgtatcgcaccttcaactgcggcgtcgggatgattattgcccttcctgctccggaagtggacaaagccctcgccctgctcaatgccaacggtgaaaacgcgtggaaaatcggtatcatcaaagcctctgattccgaacaacgcgtggttatcgaataatgaatattgtggtgcttatttccggcaacggaagtaatttgcaggcaattattgacgcctgcaaaaccaacaaaattaaaggcaccgtacgggcagttttcagcaataaggccgacgcgttcggccttgaacgcgcccgccaggcgggtattgcaacacatacgctcatcaccagcgcgtttgacagtcgtgaagcctatgaccgagagttgattcatgaaatcgacatgtacgcacccgatgtggtcgtgctggctggttttatgcgcattctcagcccggcgtttgtctcccattatgccgggcgtttgctgaacattcacccttctctgctgccgaaatatcccggattacacacccatcgtcaggcgctggaaaatggcgatgaggagcacggtacatcggtgcatttcgtcaccgatgaactggacggtggcccggttattttacaggcgaaagtcccggtatttgctggtgatacggaagatgacatcaccgcccgcgtgcaaacccaggaacacgctatttatccactggtgattagctggtttgccgatggtcgtctgaaaatgcacgaaaacgccgcgtggctggatggtcaacgtctgccgccgcagggctacgctgccgacgagtaatgcccccgtagttaaagcgccagctctgccgctggcgtttttcaattcacctgtaaatcgcaagctccagcagtttttttcccccttttctggcatagttggacatctgccaatattgctcgccataatatccaggcagtgtcccgtgaataaaacggagtaaaagtggtaatgggtcaggaaaagctatacatcgaaaaagagctcagttggttatcgttcaatgaacgcgtgcttcaggaagcggcggacaaatctaacccgctgattgaaaggatgcgtttcctggggatctattccaataaccttgatgagttctataaagtccgcttcgctgaactgaagcgacgcatcattattagcgaagaacaaggctccaactctcattcccgccatttactgggcaaaattcagtcccgggtgctgaaagccgatcaggaattcgacggcctctacaacgagttgttgctggagatggcgcgcaaccagatcttcctgattaatgaacgccagctctccgtcaatcaacaaaactggctgcgtcattattttaagcagtatctgcgtcagcacattacgccgattttaatcaatcctgacactgatttagtgcagttcctgaaagatgattacacctatctggcggtggaaattatccgtggcgataccatccgttacgcgctgctggagatcccatcagataaagtgccgcgctttgtgaatttaccgccagaagcgccgcgtcgacgcaagccgatgattcttctggataacattctgcgttactgccttgatgatattttcaaaggcttctttgattatgacgcgctgaatgcctattcaatgaagatgacccgcgatgccgaatacgatttagtgcatgagatggaagccagcctgatggagttgatgtcttccagtctcaagcagcgtttaactgctgagccggtgcgttttgtttatcagcgcgatatgcccaatgcgctggttgaagtgttacgcgaaaaactgactatttcccgctacgactccatcgtccctggtggtcgttatcataattttaaagactttattaatttccccaatgtcggcaaagccaatctggtgaacaaaccactgccgcgtttacgccacatttggtttgataaagcccagttccgcaatggttttgatgctattcgcgaacgcgatgtgttgctctattatccttatcatacctttgagcatgtactggaactgctgcgtcaggcttcgttcgacccgagcgtactggcgattaaaattaacatttaccgcgtggcgaaagattcacgcatcatcgactcgatgatccacgccgcacacaacggtaagaaagtcaccgtggtggttgagttacaggcgcgtttcgacgaagaagccaacattcactgggcgaagcgcctgaccgaagcaggcgtgcacgttatcttctctgcgccggggctgaaaattcacgccaaactgttcctgatttcacgtaaagaaaacggtgaagtggtgcgttacgcacacatcgggaccgggaactttaacgaaaaaaccgcgcgtctttatactgactattcgttgctgaccgccgatgcgcgcataaccaacgaagtacggcgggtgttcaactttattgaaaacccataccgtccggtgacatttgattatttaatggtgtcgccgcaaaactcccgccgcctgttgtatgaaatggtggaccgcgaaatcgccaacgcgcagcaagggctgcccagcggtatcaccctgaagctaaataaccttgtcgataaaggcctggttgatcgtctgtatgcggcctccagctccggcgtaccggttaatctgctggttcgcggcatgtgttcgctgatccccaatctggaaggcattagcgacaacattcgtgccatcagtattgttgaccgttaccttgaacatgaccgggtttatatttttgaaaatggcggcgataaaaaggtctacctttcttccgccgactggatgacgcgcaatattgattatcgtattgaagtggcgacgccgctgctcgatccgcgcctgaagcagcgggtgctggacatcatcgacatattattcagcgatacagtcaaagcacgttatatcgataaagaactcagtaatcgctacgttccccgcggcaatcgccgcaaagtacgggcgcagttggcgatttacgactacatcaaatcactcgaacaatctgaataaccctatgccaatacacgataaatcccctcgtccgcaggagtttgctgcggtcgatcttggttcaaacagttttcacatggtcatagcccgtgtggtagatggtgccatgcagattattggccgcctgaaacagcgggtgcatctggcggacggcctggggccagataatatgttgagtgaagaggcaatgacgcgcggtttgaactgtctgtcgctatttgccgaaaggctacaagggttttctcctgccagcgtctgtatagttggtacccatacgctgcgtcaggcgctgaacgccactgactttctgaaacgcgcggaaaaagtcattccctacccgatcgaaattatttccggtaatgaagaagcccgtctgatttttatgggcgtggaacatacccaaccggaaaaaggtcgcaaactggttattgatattggcggcggttctacagaactggtgattggtgaaaatttcgaaccgattctcgttgatagccgccggatgggttgtgtcagctttgcccagctttatttccctggcggggtcatcaataaagagaattttcagcgcgctcgcatggcggcagcacaaaaactggaaacgttaacctggcaatttcgaattcagggctggaacgtggcaatgggcgcttccggtaccataaaagccgcccatgaagtgttaatggaaatgggcgagaaagacgggataattaccccggaacgtctggaaaaactggtaaaagaagttttacggcaccgtaatttcgcatcgctgagtttaccaggtctttccgaagagcggaaaacagtcttcgttcctggactggcgattttatgcggtgtgtttgatgctttagccatccgtgaactgcgcctttctgacggggcgttacgcgaaggcgtactgtatgaaatggaaggacgtttccgtcatcaggatgtgcgtagtcgcactgccagcagcctcgccaaccagtatcacatcgacagcgaacaggcccgacgggtgctggataccactatgcaaatgtacgaacagtggcgggaacagcaaccgaagctggcgcatccacaactggaggcgctactgcgatgggccgccatgctgcatgaggtcgggttgaatatcaaccacagcggtttgcatcgccactccgcttatattctgcaaaacagcgacttgccgggttttaatcaggaacagcagttgatgatggcgacactggtgcgctatcaccgtaaagcgattaaactcgacgatctgccgcgctttaccttgtttaagaagaaacagttcctgccactgattcagctattgcgccttggcgtattactcaataatcaacgtcaggcaaccaccacaccgccaacattgacgctgattactgatgacagtcactggacactgcgtttcccgcatgactggtttagtcagaatgcgctggtactgcttgatctggaaaaggagcaagaatactgggaaggcgtggctggctggcggttgaaaattgaagaagaaagtacaccagaaatcgccgcttaatgctttgcgggccgacgagaaatgtcggcccgcattattcaggcactttcgcgaatgggttcgatttcattcagcgtatcaattaacggttgcggcttaccaataagataaccctgcatataatcgatccccaaagagagcaccgcctcgcggatctcttcgttttcaacgtactctgccactacccgcattttcttcattcgcgccaggtggcaaatcgacgccactatctgataatccagactatttgacacaatattgcggataaaactgccgtcaattttaagcagatcggcattcacatttttaagccgcgcatagctggcgtagccagtgccgaaatcatcaatcgcaatctggcagcctaattcctgaagatgctgcaaggtgatttgcgcctgcttaacattggtcagagcattactttcggtgacttcaaaaataagttgccacgcttcaatctgatatttagccagcagctgactgacttcaacaggaaaacgagcctgacataccgaggttggagacagattaatagcaaaacggtgagcgggcatcttcgctctgttttcagccataaattgcagcgtatgctcaatgacccacatgtcgatactcgacgataaaccaaattcgtgcgcgaccggtaagaagctatcggggctgatcagttcatcattctcacctttcatgcgcagaagaatttcatggtagacatcaccacgcataccggtaatcggctgggccatcaggaaaaaatggttgtgttccagcgcccgctgtagccgattcatcatcgcgactttatctttcaattcgcgttgcaaatacattgctccgcgacgctgcatattttccggggcgttggtcacgatagaaagttcggccactgtatttagctctcccagcagcaggtagatatgattcactggcgagcgcacatagcagtaactgacgccaatctgcggttgcatcggcattccatcccaaaagaaacgaaattgcttaagatggctatccagtgcggtaatgcgctcctggtgcgattctgtattcagccgcagcgcgagatcgttacccgaaagctgataaacatcttcacccggttccaacaatggtgacagccagtgagaaagtttttgcttgtattgaatccgcagcatgatgccataattcttaaccagcatttccatgccagggatgcgtaaataacaaagcgcagaccagggggcatcacgtaacgcgcgattcagggcgcgaacatttggcagatgaaccaccgggtccacatacgcaagccgctgaatgcgtctgactaccgctcgctgacgggttgccagtacagccatataattgacaataaaagagaataccagataactggaggaggttatggtcagctgcgtggtatagccaggataaatgggaatgtaattttgatagctgtggatgctgatcatcaacacgaccgcccagagcaatgaaatcagcttataaccatagcgcatcgctccccacatcatcaggggcagcaataatgacaaggtgtaattggtgctaaaaatcgtgcttttttcatttaacggcatgcataacagcaacaataaagcacctaatgccagtagccagattgcgaactcttttttggtaaccttggcatcaacctgctgttttaattgcgaataatagctacgtaaataaaacggatttcgcaccacccgaatgatgaagtagcacagcgggacaccaatcagattacccaccagcaaggcctgataattgattaaggtcccgaggttaaagggcatgacgccgaccagattttctctgctcgccagtaatccaacaaacgcagcaaactggaaaagtatcagaaacagcgttgcaggaaacacaatctgccagaatagtcgctgggaaattaaacggctatcaccatgtgaaacgttgttacgccggggagtaaaaaccctgtaaccgccccaacagagaatgataatgataataaaattagccgttaatgagagcgtttcgtaaaaacccagctctgcatatttgcggacaaaaatccctaaggcgatccctggcaatgccgcccagctgaaaaacatcatcatgctgatcatcagtgccagtggcagataaaagagaaaaacttcaccggaagaaatatgcgcgaaagtattaatgtgggcgaaaatgggcaagattaaagaaggcaggaacagcggaagcccccaccatttatcacgtatttttatataagttgcattcagtttcatagatgctcagcagaatcccccacatcctgaaggaggtgtattcagacaggcatcccacctgacttcgaatgatgattattcatcactatagagagcaatgattctaagtgtcatatgaaagttccaattgatatatatcaaacaaaataaccctgattaatgaattattacgtttatcatgttaactcatcattattacatcatcattgtaaataattaaattaacttccataacattaaaatatgtatccactgacgcttttttacataacgaagaattgaccattttgtcctgttgtgccttaatgtaagtaccgtccacggcgtgggacatacttcaaggaaccttttgtgagtcaggcaaccagtatgcgaaaacgacaccgatttaacagtcgcatgacccgtatcgtactgctcatcagctttatcttcttctttggccgttttatctactcgtccgtcggtgcctggcagcaccatcagagcaaaaaagaagctcagcaatccacactctccgtcgaatcaccggtacaacgttagcggttaccttctccactctcacagaacataacggcacctcgctgtcggatgcttttgctctttgagattatcaaagcggcagatattctttcatcttaaattttacgtctttgttctgactgaagttcatcctgttcggctgcgaaataaatacatcattaatacatatgttgtgatgatgtatttttataaattatttcccatatgaattttaataaatttaatctattcctttatacgcaatacatttactttcctcttttgatgatcttaaatgtcttatttttcgtaatgtgtataacaaggaatagtgatgaaattaaaaaaatgtcttctgcctgtggcaatgttagcgtcatttactctggcaggatgccagtcaaatgctgatgatcatgccgccgatgtttatcaaaccgatcaactgaataccaaacaagaaactaaaaccgttaatattatttccattcttcccgcaaaagttgccgtagacaacgcccaaaataaacggaacgcacaagccttcggcgcgcttattggcgctgtcgctggcggtgttatcggccacaacgtcgggtctggcagcaattccggaacgacagcaggtgcagttggcggcggagctgttggcgcagcagcgggttctatggtgaatgataaaaccttagtggaaggtgtttctttaacatataaggaaggcaccaaagtgtatacctccacccaggtgggtaaagagtgccagtttacgacaggtttagccgttgttattaccacgacgtataacgaaacgcgtattcagccaaataccaaatgtcctgaaaagagctaataatcaggaggagtcatgaagaaagtttttctttgcgccatcttagcctccttaagctatccggctatcgcctcatcattgcaggatcaactctcggctgtcgcagaagcggaacagcaaggtaaaaatgaagagcaaaggcagcatgacgaatgggtcgcggagcgcaacagggaaatccagcaagagaagcaacgtcgcgcaaacgcccaggccgcggctaataaaagagcggcaacggcagcagcgaataagaaagctcgtcaggataaactggacgccgaagccactgcggacaaaaaacgcgatcaaagttatgaagatgagctacgtagcttagagattcagaagcaaaaactggcgctggcgaaagaagaagcccgcgttaagcgcgaaaacgaatttatcgatcaggaactgaagcacaaagctgcgcaaaccgatgtggtgcaatctgaagctgacgcaaacagaaatatgactgaaggcggtcgcgatctgatgaaaagcgtgggtaaagcagaagagaacaaatcggacagctggtttaactaagcgatgtcagtaacttcaagcctatgattcgtgagtataaaaaaccctctgtagtaacagagggttttgttcattcatagtacagggttcaaatcattcccactcaatagtcgctggcggcttgccgctgatgtcatacaccacgcgggaaataccgttcacttcattgataatacggttggaaacgcggccgaggaagtcgtacggcagatgtgcccagtgtgcggtcataaagtcgatggtttcgacagcacgcagagagacaacccagtcatacttacgaccatcgcccattacgccaacggaacgtactggcaggaagacggtgaacgcctggctgactttgtcgtacaggtccgctttacgcagttcttcaatgaagatggcgtcagcacggcgcagcaggtcacaatactctttcttcacttctcccagaacacgaacgccaaggcctggtcccgggaacgggtgacggtacaacatgtcatacggtaggcccagctccagaccaatcttacgcacttcgtctttgaacagctctttcagcggttcaaccaggcccatcttcatctctttcggcaggccacccacgttgtggtgagatttgatgacgtgtgctttaccggttgcagaagcagcagattcgataacgtcagggtagatggtgccctgcgccagccacttcacgtcttccagtttcagcgcttcttcatcgaatacttcaacgaaaacgcgaccgataattttacgttttgcttccggatcgttttcgccagccagcgctgacaagaagcgatcttctgccggtacgtgaacaatgttcagaccaaagtgatcgccaaacatatccagaacctgctctgcttcgttgagacgcagcaggccgttgtcgacgaatacgcaagtcaggtttttaccgatagcgcggtgcaacagcattgcggtaacggaggaatccacgccaccagagaggccgaggatgactttatcgtcgcccacttgctcgcggatgcgggctacagcgtcgtcgataattttcgctggcgtccacagggcttcacactggcagatatcacgcacaaaacgctccagcatgcgcataccctggcgggtgtgagtcacttccgggtggaactgtacgccatagaagcgtttttcttcgttggccatgatggcaaacgggcagctttcggtgctggctacggtgacgaagtcggacgggatagcggtaactttatcgccgtggctcatccagacgtccagcagcggtttaccatctgcggtcagcgcatcttcgataccgcgaaccagtgcgctgtcgtttacgacttcaacctgcgcgtagccaaattcacgttcgttagaggcttcaacgtgaccgcccaactgcattgccatggtctgcatgccatagcaaacgccgaataccggtacgcctgcttcaaagacatactgcggcgcacgcgggctgttttcttcggtggtgctttccgggccgccggaaagaataatgccgcttggattgaagtcacgaatttgtgcttctgtcacatcccacgcccacagttcgcagtaaacacccagctcacgcacgcggcgcgcaactagttgagtgtactgagaaccgaagtccagaatgaggatgcgatgcttatgaatgttttccgtcattgacgcttattccgaggcaagtgaaacagataatataaatcgcccgacatgaagtcgggcgaagagaatcaggagcccagacggtagttcggggactctttagtaatggtcacgtcgtgaacgtggctttcctgaatgcccgcaccgctgatacgtacaaactccgctttagtacgcagttcgtcgatagtaccacagccggtcaggcccatacaggagcgcaggccgcccatctgctggtgaatgatctctttcaggcgacctttataggctacgcggccttcgataccttccggcaccagtttgtcggcagcgttgtcgctctggaagtaacggtcagaagaacctttggacatcgcgcccagggaacccataccacggtaagatttgtaagaacggccctggtagagttcgatttcacccggagattcttcagtacctgccagcatggaacctaccatcaccgcgcttgcgccagcggcgatagctttagcgatatcgcctgagaaacggataccgccgtcagcgataaccggaatgccggtaccttccagggcttctactgcatcagcaacggcggtgatctgcggaacaccgacaccagtcacgatacgcgtcgtacagatagaaccagggccgatacccactttaacggcactgcaaccggcttctgccagcgcgcgggcacctgcagcagttgccacgttgccgccgatgatttgcaggtcaggatatttagcgcgagtttcacggatacgctgcagaacaccttcagagtgaccgtgagaggagtcgatcagcagaacgtcaacgcctgcggcaaccagcgcatcaacacgctcttcgttaccagcgcccgcgccaaccgctgcacctacacgcagacggccttgttcgtctttacacgcgttcggtttacgttccgctttctggaagtccttcacagtgatcatgccgatcaggtggaattcatcatcaaccaccagcgctttttcaacgcgtttttcgtgcatttttgccagcaccacttcacgggcttcgccttcacgcacggttaccagacgctctttcggcgtcatgtaaacgctaaccggctggctcaagtcggtcacaaaacgcacgtcacgaccggtgataatgccgaccagttcgttttcttcggtaacaaccgggtagccagcaaagccgttacgctcggtcagttctttcacttcacgcagcgtcgtggttggcagtacggtctgcggatcggttaccacgccagattcgtgttttttcacacggcgaacttcttctgcctggcgttcaatggacatgtttttgtggataaagccgataccgccttcctgagccagagcaatagccaggcgcgcttccgttacggtatccattgctgcggaaagcatagggatattcagacgaatagttttcgtcagctgagtgctgaggtcagcagtattcggcagaacggtagaatgagcaggaacgaggagaacgtcgtcaaacgtcagagcttctttagcgatacgtagcatgggcaatatctcgaccagagtggttaataaatattgccgcggcattatacagagcgtaaccgattgcatctacccctttttgcaaaaaatgcttgctatccccggagggcgggttactatcgactgaataacctgctgatttagaatttgatctcgctcacatgttaccttctcaatcccctgcaatttttaccgttagccgcctgaatcaaacggttcgtctgctgcttgagcatgagatggggcaggtgtggatcagcggcgaaatctctaattttacacaaccagcctccggtcactggtactttacgcttaaagacgataccgcgcaggtgcgctgtgcgatgttccgcaacagcaaccgccgggtcaccttccgcccacagcacgggcaacaggttttagttcgcgccaatattacactctacgagccgcgcggcgattatcaaattatcgtcgaaagtatgcagccggccggtgaaggattgctgcaacagaagtacgaacagcttaaagcgaagttgcaggctgaaggtttgttcgagctgcaatacaaaaaatcactcccctcccctgcgcattgcgttggtgtgatcacctcaaaaaccggtgctgcgctacatgatattttgcatgtgttaaaacgtcgcgatccttctctgccggtgatcatctactccaccgccgtacagggggatgatgcgccggggcaaatcgttcgtgccattgaactggcgaataagcgcaacgagtgtgacgtgttgatcgttggccgtggcggtggttcgctggaagatttatggagttttaatgatgagcgtgtggcgcgggcgatttttgccagtcgcattccgatagtcagcgccgtcgggcatgaaaccgatgtgacaattgctgactttgttgctgatctacgtgcgccaacgccgtcagccgccgctgaagtggtgagccgtaatcagcaagaattgctacgtcaggtgcaatcgacccgtcaacggctggagatggcgatggactattatctcgccaatcgcacgcggcgctttacgcagatccatcaccgattacagcaacagcatccgcagctccggctggcacgccagcaaactatgctcgaacgtctgcaaaagcggatgagctttgcgctggagaatcagcttaaacgcgcgggtcagcaacagcagcgattaacacggcaactcgtccagcaaaatccgcagtcgcgtattcatcgcgcgcaaacgcgcattcagcaactggaatatcgtttagcagaaaccctgcgcgcacagcttagcgccacgcgtgaacgtttcggtaatgcagtaacacacctcgaagccgtaagcccactgtcaacgctggcgcgcggttatagcgtcaccagcgccgctgatggcgcggtgttaaaacaggttaagcaagtgaaagtgggtgagacactgaccacacgactgggagatggtgtggtgattagtgaagtcagcgccgtaacaaaaacccgcaaatcacgtaaaaaaacgtctaatccgtagaccggataagaggcgccagcatcgcatccggcaataactcccaggctacgccagatccgccatgctggttactggaagcaggtcaccagacccggtttatttattagcgtgatactacaatcctgtgctccagtaccttcgtccatcccacactgttgagaggacaaataaggaaaactgggtgaagacggccatcccagtgaattaaaaacagtatgcaacaactctaattcattgtatgtcggtgcattttctatgctgccacactgccttgcgatatcccatttactggcatcaatgatatgtgcagaagcccagttttcgtagttaataatcggtgaggatacgggattagccccggacggcaattccgtcgttaacaacggtcgatgtagcgatttactattcaccactaccgtgtctgccatatgtccccaaaagtgcgccgaggaaacatttgggctggttggtaccgtaaaaatagcgtccagcgtgtctgtcgcggaagcgtaattagccagagtaaccgtcagtggcgttttataaccaggggtattatcctggcggagcgaaaaacttgccgtcccatccgcgcctgtcatgccactaatggtattaccgctttcactcagcgtaacagccgaacctgataacggctgaacgacgagatcgtccatcgccactacattgccatacaacgttgccccagcgttacgcggcgatgcctcaccacgtttcaaagtaaattcaacattcggcaccgtattcccggcgctgtctttcaccgtcacggtaacggacatggcttcgccttttttcactttcgccgcctgagtggctgcatcaaacgctgttgaggtaagtgtgacgctggaaaccgttgaacgcgcgttagccaggcaaggctgaaatgattttgttgaacccgtatacagcgtgccatttctcaaatcaaccgactggtctttaccatcggcggatttatcctctgcccaccaggtgtaatacgcaggccagccagtttcagtgacaaacgtgttattcggataacgcgcagacaacgaacttaaatcattgaatagtggctgccttgctacttcacaagggctcacactcgcatctgatttctgtgttggggtaaagtacggccagtcttcattattgttattgatcttgccgacgccagaagtcgatgtcagttcactccacaatttcgggcgttcaaataccgcaccattcactgccgtcaaggttgctggcatatgcccccagtagttagccttcgcagaatccgggctggtcactaccgtgaatatcaggtcctgattagccgtaacctgcggatttcgcgccaatgaagctgtaaacggcgttaccagaccaacggtgttattttgggtaacgttgaacgttatcgtgccatcactgccggtgaagccgctccatgccgacgtattctggttgaaggagatacgcgccgatgtcggggtgacttcatctaaaatgagatcatctacggtattggaggatacagagatccctgaacggcttttcgcctgcacgcgcttgagcgtaacaccttcgccgccaacaggattaccattggcatctttgatcgtcaccacgatgggaagcatctcaccttttttcacagatgacgtgggggtaccaccattgctggcagttcggccctcatcataggcagtcgatgacagcgtaaggcttgctggtgccgaatgtggctgcgtcagacagagcattaaagcgtatccattaatagtcgtcgtcgattgtcccgttttcaaattaatgacgccgtaataccacgtcaacgcgtcagtggtgctcatttcataagtccaccaatttccacttccggcagttataggcaaccccaaatctgtcagtattgtcccgcctggatgatcattatatagcccctgtaactcattgagacgcggctgatactcaaccgggcaatccggcgtaactttattggtataaaaaaggtatgaccacgactcattattattacttaccgaggaccccaaggtcgcttctgctgccagtagcggtcgtttaaaggtcacccccgccctactggtaaacgtgtcgggcatatgaccccagtattttgctttcggtgagttcggactggttatcacagtgaaaataacatccatcgtggcactttttgtggtgtcgcgcatcaatgttgcagtgagcggagttgccagcccataagtctcgttttgcgtcacatcaaaagtcgctttaccatcacttcctgtcgtcagaagtgcctgtgccccattattatagagtgacatgtttactccggcaggggtgaccggcacgatagtaagatcatcatacgtagaatctagcctgttttttgcacgatccaacgcagtcccgcgtatgagattaaagtttgcgcctggcaacagatttcctccgctatcccgcacaatcaccgtcatccggatcgccgtacctttcgccgccgttgcactagggcgaccatcgttgctggccgttttctccgcatccagtgccgtggaggtcatctctatagaagctgccactgcatgagggtttaccagacaggacacaaatgccacggtgtttgataatgccctggagcttgatccattcgataaattaatagactgatcgtaccagacgttcgcgtaggcaattttatcgtaagcccaccaggtgttagtcagcggaaggcctaaatcggtccctatcgcaccattaggatgttcactgtataactcttgaaattcgcttaataacggttgataaggttcgccgcagtctgatttgctgacatcattttttgctgccgtattcaaagaaagccatgattcattattagccatggttgactgccccgctggatgctcggcagtaagcaatggccgcttaaaggcaattcccgaccgggtagtaaacgtttcaggcatatgcccccagtaacttgccagtggcgtatccgggctggttatgacggtaaacatgaccggtaatttgttggattctatcgtcagctgatacaactgggcgtacatattggttaccaggcccatagaatcatcttgttttaccgtaaaggaggtagtcccgtccgcgccagtcaccccataaagcaggcttgaagaactattcatcctcgcagaagcgcctgccgcgttaattaccgtaatcgacttatttatcatctcggcattttgacggttcttcgagccttcacgtctgagaataaaggggacattgggcacgctatttccctgcgcatttttagtcaccacgcgaatcaccgcgtcttcgccttttttcactttcaacgcactcaaggtgtcgtcaactttgacaaattgcgccgtatcattcgcctcaacaatgatctgactggcaacggcgacaggcgtggtccggcagctcagtaatgcaccaccagatgagggcatctgcgtttcatctcctgtcttcagcgaaacgacatcatacgtaaaggtttgagtgaacgtatctgcaacggtattcgagatatagaacctcgacactggccagccaatagcatcatgtaatgcgctactcccctggtgcgcataaatggccctaagttcattgtcagttggaacatactccgcgccacaaccatttatcgaggtatcgttagcctggcccgacgggaacgtagaccaggcctccccctcttccaccagggtaccgatactggtggtagcactattctcgtccctcagcaaaggccttcgataaataagaccgtcatcgcctgtcgccgtttcagccatatgcccccagaatttggcttttggcgaatccgggctggtaagcaccgtaaagacaacgggaagcgtcgatttagtgctgctggaggaatccaacgctgccgtgagttctgtttttagcccggtagtctggtcttgcttcaatgtgaaagtggtggtgccatcagcccccgtcacgccataaataaccagggtcgttgaaagaaaatcattttgagtatttccccaggcatccgttaccgccagtgaagcaatcgacgtcgtagttgacacattggccctgttcacgctggtgtttcgtttgagggtaaatgcggtatttcccacaggcttaccctgcgcatctttagtggtcactcgtaatacggcttcttcaccctttttcactttgacaacattattcatacggtcaaattttgtgaggtctgcagcttcaagaacgatttggcttgccttaacaatcggcgtcgtctggcaggtaagcagttcttttgtggcagatggaattatcgaactggtgcctgaactgagattgacggccttgaagtcacgctgttccaggctactactacctgtcgtgctggaaaggtaacttgaggcgacgggccagccctgaaccgttttcatcgcatttccgcggttggcttcatacaatgactccagcccggcctgagagggaacatattcactaccacaaccattagaggatgtgcttatagcctgagcttgggtaaattgcgcccagtcttcattatcttccgcaatcgctgttcgacccgacgtactggataactctttcaacaataatgggcgtttaaagaccgctccatctgcagccgtcactgtttcaggcatatgcccccacattttcgccttatcgctgtccggactggttacaacggtaaaaatggtatcgagggtcgcttttttcgttgtatctgaatagagcctagcggtcagcgacgttttcgtgccatgggtatccgggcgggtaatagtgagaattttagttccgtcgctgccggtcatggcgctgtatgctgcagcggtattattaagcgaagtttcgtccgccaggccaccattgaccacaaccggcgcaaccagcgcatcactgctaccagcaacgtgtttttcctctgagcgggtataaccatcgccacgtttcagggtaaagggtatatcacccaatggattgccctgcgcatcttttaccgtcacctttacctgtagcgtttcgccttttttcagcttcgccgcatttgcagccgcgttccactgcgccggatctaccacttccagcgtaatgctgctggcaggattgttagccgtcgtcaggcaactgacataaaccgccgtgctaccgccaacggtccgcgccccatcgttgagggctatggtgtaataatgcggtacctgatctgcgggcgaactgctccagtagggctgacgctgcgttggccagccgtgtactgtctgtacaccgttaccgttattggcatcatagagcgcgctaagctgagaacggcgtgggagcatattggcgccacagccacctttactggtgctggaggcgttggcctggctgactcgcgaccagacttcgttattttccgttaatgtgccgtccggactgaacacttccgcagccagtcggggtcgggcaaaggttaaagcatcgacggtaatcgtctcatccatatgcccccacatctgcgcgccaaccgcatccggactggtgagcgtagtgaaaatcacattgtaattaacagtattgggaatataggagttcacaggcacaatatttagcggcgtcgataagcccacaccttgcgattgcttaatttccacagtcgcaaaaccctgcgcatccgtagtaccggcatagactaaagacggttgcgatgttccgtagagtgtgccattcatctcgattgcgccgcgggttggatcatcaaaacctgtagtctgcccctgacgatttttccccatatctttagtgatggtgaacgcggtatacggcacgggtgcattattcaaggcattaaaggtgcgtaccgtcatggtgatcgtgtcacccactttggcctgcgctctgctgcctgcggaaacatcacgatcggtggtcgcggcaatcttggcgaccatctcattgcccgaacaagagagatagttttgcttaaagccggaataggtgtcgatgttgcccgtggccaggtttaccgacgcgtgcgacgtctcttccaccgcactaagatacgctttttgcaacgttggccagccatattcggtgccgatggcattggctggatgagcggcaaacaaactgtgcaatgaactttggctcggaatatgacctaaaccacactcagcctgcatactgctattctgatcaaacagcgcccagtcttcgttattttcccgcaccgatcccagttcgttgtcggtttcatccgccagccgtgggcgtttaaagatattgttcgcttcaataatgcccaacatatggccccacatccgcgctttgtcggtatcggggctggtgatcaccgtaaaaataacgtctttctcatccgaggcagtaaaatcactgcgcattctcgcggtgatgtgagttttcacccccacgccgcctggctgggtcagcgtcagagtggcctctccgttagcatcagtgatcccttcataggtatgggcgtcaactttgcgaacgttactgccgccatcaatttgtaccggatgcgtctcccacgcggcgtcagtttgattcttacggttaatgccgtcatccagatgcagcgaaaagtagtagtaagccagcggctgatcgttgttcttgctatcggtaatcgtcagacgtaaagaagcctcttcccccacctttactttcatcgcttttatcgtcgaatcatagctgcccggcgtcagtaccagcttcggttcaacatcgggcgcttctttatcgacacagctcacaataaacgtcgtatcgtccggtttttgcgcttcgctgcggttcgaaacatccgccgcatggtgctggccgctcatccccgccagtgatgaccagtagaaattaccctgcatcggccaaccagccacatcctgcactgacgttggcaccaccgtcgccagcgcaccgaactgacgcattccgggcaaaatgtcgcaatgtttatccgcgccgctccaggtaaaggtggaccaggtttcattgtgatcgttaaccgtaccgccttcattatcgacttccgccgccagttttggtcgactaaaagtgtaatcacgggccttcagcgtatcgggcatatgaccccacattgtagcctgcggaacatccgggctggtgaggacggtaaagatcactgccgtttcactggcctgagcaatacccgcgaggctcgcgaccaacggcgtttttacaccagggccgttggcctgggtgaccgtaaccgtggcaacaccattcgcatcggtagtaccacgatattccgtcgcggtggtggttaattcggtcgtgcccagttttacaggcgcagtattgttcaccacaccctggcggttttcagcatctttgcgtttgataacaaaaggaatattccccacaacattaccgacgcaatctttggtggtgaccgttaacgtgatactgcccccaaccgtcattttcgccgcacctgaggattcgtcatagcccgcagcgctgacggaaataaggtcaccctgcgcgggcgcaatcttcagcgtcactttctgatcggcgagcgtcagaacactttcatagggatagcccgtcgaggtgagtaaatataacagcggcatggtctgctggggatcaggctgcgcccaggcgaccagcgaacgcccggcaagtccctgtgcacaaaacgagcgatctgcgactggctgtgggtccagtaaggtgtccggcgtggcggcatccgcccaaactaaagatacagccggtggcgtttggttttcccaacgtggggtggcaatgatatcgccttctctgtcttgcgggttggtgacgagcaatttagagacgctaacatccgcgttgaattcactcggtttagcggtaaacgctacctcatgcgtctttgtaggatccagaaagacactgccctggtagacgggtatgctggcgctgtcggcggtgggcacggtaccgttaaattcgccgaccgtatctgaagagtcttgccatgcagattctgcccatgaccacccaggcagcattgcgcttatcagcaatgcgcataacacaaggattttattcagggtcagggacatgacagaaactccaccggttgttaaacggacgcttgtcgcatcaacatattttgcttaatccgggattaagcaaaatatgcggaaacagcattcccttgcgggaatgctgctgagtacgcgttatttgtgtttgtaaataatgtgaagtttgtaaccctgtaccccgtcgccgttggtcgggatggaaagtgcctcttttccatcgcgcgcagggccgttaaggttggttctggcttcgtcgttggtcgcagggatgaccaaattgttattatcgaagcttgagttaacgatgccacccgaagtgccaagctgttggctgctgccagaaagtacccaacggaagtcataattggcggtgacgtcagcatcggtacccgcatcaaacttgccatttttgttctcatccgagtacagtttggccacgtaggttttgccaagttcgattggtgtgctaccgttgataaggttgatactggtaccatcaacaaagatggcgactttcaggttctggttaaccaccggccccggtgcaacgttatcgctgtcgcttccgccgccgctggcagtagaaacgtcataaagatgcagcgcagtcccgacgtttggcgtaccggtctgcgtggttggcgtaatttcaataccgatatagcgaccacggtcggcatcggtaagagtgtaactggtcaccttcgttgccagctcttttggatcccccccctgcgcatccttgtagctcatccagcggatagtatcgatagttttcgcgttatcgcccaatccaccaagatccacgtcgccttcggtatcaccaatttcccaacttacggttaatttatcacccgagtaaagacgcttgtccgtttcactgccttgcgggcgagcgccttttagatcagaagtcaacgttacacggtcggcatctgtcgtagcacttcccccttccgaatagagccacggaatggtcccctggaaaatattggtttcaccgctgtcgacccaggcgctgtcttcagccagcgccacaggtgccacacaataacctgccagtgccagcgctaatgcgatccgggtcagaccgcgtcttttatcctgcttcattgatgctctccttaatgaaccttcagcgactggccgactggccttacgccaatcttattttttggtatacagcacgcgtaaaccgtatccctgcaagccatctcccgcttgtgcgccataggtttgcgccgcttcacggttagtggccggaatcacaatgtcctcattggaagtgttcgcctgtgcacccacttcaccattgatgctcttgccggtaaattcccacttgtagtcgtactgcaccatctcttcgtcagtcagtttttcgacctgctggaagacaccgtctttattgttgtcgcgccataaaacaaatcgataaatgttgttgagcggcaacggttctttatctttacctatcaggttgctgggtttagccgcccccacacgatagataaaagcatttagcccaccaatttctgccccgaggaaagtgacatccacatagttactgtcatcgtagggcgcggcttttgctttccagcgataggtgccaggtaaggtactggagagggtgacagtgcccttttctttatcttgtttggcaataaaaacgcaggggttatcggtcgagcagggcttgttggttaacgtcactcgtttgtcctgcgcgtcgtaaagctgaggcgtaaggttatcttccggcaacgcatcgccgttgcggtcggtgttatcgccaaagctgtcggttacatcgagatccatcactacaccatcaacgccatctgcctgtgcgctggcttcgtggctgtggttgttctcttctggcacgttcgcgatgttattaacaatcaactctattttacggtcctgctgaacggtgatttccaccacgccagagttctgtcggttgcccttttcatcttccagcgccagacgtactcgccaggtattgagtttttcttgttcggcttgatcggaactgtactgccaggcaggcagcaccaggttccagtggttattgttaccctctgtcagagtattctctttgataaccggcatcaccagcgtgcgggcggcattgtttttcgcctgccaggaggccgcaacgattttgtaatgatgattaatgagtgcgttaatggtccacttacatttttccagaccgacggccgcttcgggagtgtccttaatgacgcactcagggtgctcgttggtggcatccgctttcaaccacagggtgacatcaagcggatctttttctttgtattccagaacaataaagttattacgctcaacgaaatcaagacggctgcccatcagcgagtgcgccgctttcactttatcgctatccaattgatcttttagcggaacgccgaactgataattaagagtggcattaatgctgacatcactgttatctccggtccccgctttatagtccgtcccaactgtcagtaacggcactggttgataattcagtccaagcgttaccgcgtagggatctttctccaaattatccgtaccaaaaagggcgacttcatcgccgtaatattgctcgaagacaattttgccccccagttgcggataagaaggtaaccagacttcggcacgaatatcccaaccgcgcgcagggcgttcttcataaaagtcgaaatcttcagagtctttccagtcagaaagtgggtgataatagttgcctgagaattttaaataatccgtccaggcttcggcgcctaaacctaaacggcgatgtccacgggtaaagtcataatcataaaatatatttccacccaatagatatttatcaaaattataccttaccccaaggccaatattcccgatcgtacgatcttcttttcgttgcgcagaaaattggctgaaataaacagtggtttgattatcgtaccagggaacaaaataatcgatggaactgccatccagatcgccgccctgaccaatggagaggttcaaacggaccttaccgtagggagagagtgtgtcttcaatataagattgtgcggttgaggtgatttgactttgcagatagcttctggcctgagattccagcgcctcaggggtcaagttttcaaacccttgcgtggcggagttgatgacgtaatcggctccgcgctctttcagcgatttacccttgttggtttgttcatcctgttgtgctgcctggctacctaaatcaggtaacgattcgttttgcttaacatttatctctggcgccgcgaaagcagcaccagagataaatgttagaataatacagcgtttccatcgcagcatgcactttccctgtgacaatgatacagtcaaaaataagctttaatattgtatccctgattattcagaaaggcatgtcataaagagtaaatatattcttaattatttaaattagtgatttcactcaaatacattagttattccactaataacagattgtttatcattcatatattaaatataaatgataaaacaatacattcacatgatattaagcaataataaattcaacgcgttttttagatattaaaccgtgcccatgttggcagaaataatccacagcaccacaagcttttaacacttgtaacgcctgatgacactcagggcaaagtgcctggacggtaaagtctttgtcgcaagttgcacagtgagcagtctcgccattgcgttcgagaggggttttgcaggttggacagttgagtgccataaatactcctcgcgtgttattcggcttccctctccgtgtggaaagggaaaccagataagtgattacttacttttcttgatatgcttcatcagacgcttacgtttacgcatctgggttggcgtcagggtgttacgcttgttcgcatacgggttttccccttctttgaactgaatacgaatcggcgatcccattacgtccagcgatttgcggaagtagttcatcaggtaacgcttgtaggaatcaggcaggtctttcacctgattgccgtgaatcaccacaatcggcgggttataacccccggcgtgggcgtatttcagcttcacacgacgaccgcgtaccagcggtggttggtgatcttcaacagccatcgtcatgatgcgcgtcagcatagaggtccccacacgacgggtggagctgtcatacgcttcacgtactgattcaaacaagttaccaacaccactgccgtgcaaggcagagataaagtgcacacgagcaaaatcgataaagcccagacggaagtccagcgtctctttcacctgctctttcacttcctggctcaggccgtcccacttgttcactacaatcacaagtgagcgcccactattgagaataaagcccagcaaggagagatcctgatcggaaataccttcacgcgcatcaatcaccaacatcaccacgttggcatcttcaatggcctgcaacgttttgattaccgagaatttctctaccgcatcggtgattttgccgcgtttacgtacgccagcggtgtcaatgagcacatactcacgtccgtcgcgttccattggaatgtagatactgtcacgcgtcgtgccaggcatgtcgtaaacaacaacgcgctcttcaccaagaatacggttagtgagtgtagacttacctacgttcggacgacccacaatcgccagtttgatcggcaaactttgcgggtcgaagtcgtcttcctcttcttcttcgccgttctcttccgcttcaaattgcgcccagtattcggcgtcttcgtcgacttcttcttgcggtgcgagatcttccatccacggcagcagcacgtgctccagcagacttaatacgccacgaccgtgagacgcggcgatcgggtagatttcacctaaaccaagcgcgtagaaatcaaccacggcctgatcgggatccagaccgtcagttttgtttgccaccaggaaggtcggtttttcacgggagcgcagatgtttagcaatcgcttcatccgccggcatcaggcccgcgcgcgcatccaccataaacagtacgacgtccgcttcttcaatcgccagcagcgactgttccgccatgcgggtttctacaccgtcttctgtgccatcaatcccgccggtatcaatgcagataaactcacggccttcaatttccgcacgaccgtacttacggtcacgagtcagacccgggaaatccgcaaccagcgcatctcgggtgcgagttagacggttaaataacgtggattttcctacgttagggcgcccgacaagcgcgaccacaggtaccatgtttaaagcctcatttttataaatcatcagacaacgcacgctatattcgtgtcgttgttaaaaacaggaaaacggcccctgtccaggagccgttttcaaagtgaacgacagagacgattaacgtgtaatagagtacacggttccgtcttttgcctggatcagcagtttgccgtcagcagcaaccggttcagtctggaaaccggaactatcaactttttgctgggcaacgaaacgaccatcttcgacgttaatccagtgcagataaccttcactgtcgcctaccaccaggttgccattatacagcaccggagaagtcagcaggcgatgcagcagatcgctttgtgtccacagcgtaacgccgccatcaatggtcaacgccatcacccggtcattttgatcgaccagatagatgcgattgccgtcgacgatgaaatcattcaccgaacccagttcgcgtttccacataatctgaccactgcgcagatcaagcgccgtcaggttaccattataggccagcgcgaaaacaacaccgttaacaacgacgggagtcgtgtcaacatcgctcagacggtcaatttcggtagaaccggtcgcctgggaaatacgctgctgccaaatcatctggccctgttccatcagcactgcgctgacgcgaccattatcgccacccacgacggccgcaccaaaagccgttgccggcgcagactcgccacgcaaagagagcgaaggcatatcgaggttaactgtccatttgacagcgccgtcagcttcgttcagcgcttgtaactgaccgttactggtgtggattaacaccagaccgtcgctgaccaccgggcgcgaaagtgcttcacccgcgactttagtttgccatgccacagtaccatcgctggtattcagcgcgtaaacctgcgccttttcggtgccaatgtagacatgcccaccagacacggtcacgccgccagaaagtaatgcaggatctttagagaaccagccatctttctcggccaggttgacagaccagatttctttgccgtcatccgcattcagcgcttttactaaaccagcgcggtccgctgcatagacaacgttgtccgccagtgccggatgaagattggaatagaagttgccaatgccgctaccaacggaagtgctccacgcagtagtcggcgtaaactggttttcaacggttggcaatggggacatctttaccacatcttcttcgctgttaaacagcgaacagccgcttaaaagggtaacggaaagcagtcctggcagcagtaatttacgcaattgcatcgggtccctctcagatggacaaattattaattttcatctgcatcatttcgctcagtgccggggtaacatcgcttttcacgcctgcttcccatgcactacgcgcaccttgcttatcacctttgctcagcaatgcttcaccacgcaggtcggcaacaatggcagcccacccttcacctttgatagcatcaagggtttttagcgcggcatcagcctgcttgagctgtacctgaacgcgagcaagacgcagatttatcacggctttgagattttcatcgctcgtgtctgccagcccctgttgtaactgggcggcagctttctctagttcatttttgtcaacaaattgctgcgcaagttccaaagaagccagcgcaccataagtatttttattttcagcagcaaatttttccgccgctgggatgctatccggtttgccttcgctcactgcggtaaccgcattttgataggcaagagaagcggagcgtgcagaatcaacctgatggctgttccagtagcgccagccaatcagtgcgccaacgcccaaaatcaccccaacagccagtgctttgccattttcagcaaaaaagcgtttaaccgcttcaacctggtcgttttcgttctcgtaaatttccacgctgtccttctccttccttaacccagtaacgtgcgcaaatgcgcggctacgctatcctgcgcaactgcagtttgctcaccagagcgcaaatccttcactactgctgtgccgttagccacttcagactcacccagcaccacagcaacgcgggcaccccatttatcagcacgggcaaactgtttcttaaagttgccgccgccgtggttggtcatcagtttcacgcccggtaattcatcacgcagacgctctgctaatgccatagccgcagattgtgtgtcagcacctgaagccaccaggtatatatcgacaacaggatcggctttaaattccggattaacggcctgaactaacaatacaagacgttcgaggcccatcgcaaaaccgactgccggtgttgcacgaccacccagttgttccaccagaccgtcataacgaccacctgcacacacggtgccctgggaaccgaggctgttagtcacccactcgaaaacggtacggttatagtaatccagaccgcgcaccagacgctggtttacggtgtaagcgatccccgcgctctcaagcagtttgcacagaccggcaaagtgctcacgagattcctcgtccagataatcgcctaatgccggagcgtcgttgagaagcgcctgcacttccggattttttgaatccagtacgcgcaacgggttagtgtacatgcggcgtttgcagtcttcgtccagcttttctttatgctgctcaaggaatgccaccagcgcatcgcggtaattcgcacgagcttccagcgaaccgatagagttcagctcaagagttacgtgctcggaaatacccagcgcgcgccaccagcgggcagtgagcataatcagttcggcgtcgatatccggaccttgcagaccgaaaacttcgcagcccaactgatggaactgacgataacgccctttctgcggacgctcgtgacggaacataggcccgatataccacagacgctgttcctgattgtacagaagaccatgctcgatgccggcgcgtacacagcccgccgtcccttcagggcgcagagtcaggctgtcgccattgcgatcctcaaaggtgtacatctctttttcaaccacgtcggtgacttcaccaatcgcacgtttgaatagcggggtctgctctacaatcggcaagcggatttcactgtaaccgtagctgccgagcacgtttttcagtgtgccttcaatgcgctgccagatggccgtttcgccaggcaggtaatcgttcatgccgcgaatggcttgaatgttttttgccacgtttattctctttctgaatataaaaatgaaccctcaacgcttccctcaatgtttcgggagccatgcgggttcaatcatacacgggaagcgaggcgcttcccatcacgttattatttttcaacctgctgaacgtcaattcgacgcgcttcgtccagctgactggctttcgcacgaatgcgcgcttccagctgatcgatcatatcgttgttgtccagacggtctttgcgcacgccatcttcatagaggccgcttttcttgttgccgccagtgacgccgagtgtagaaaccagcgcctcacctgggccattcaccacgcagccgataatcgaaacgtccatcggagtgatgatatcttccaggcgttgctccagcgcgttaaccgtaccgataacatcaaattcctgacgcgaacaggtcgggcaggcgatgaagttgatcccgcgcgaacggatgcgcagcgatttcaaaatatcgaaaccgactttgatctcttcgaccggatcggccgccagcgatacgcgcagcgtgtcgccgatgccttcagacagcagcagacctaaaccaatagcggattttactgccccgctacgcgcaccaccggcttcggtgatccccagatgcagcggctgatcgatttgttttgccagcaaacgataagactcaacagcgaggaagacgtcagacgctttcacgctgactttgaactgatcgaagttcaggcgatcgagatgatcaacatgacgcatggcagattccagcaacgcctgcggcgtcggttcgccatacttttcttgcagatctttttccaacgatccggcattaacgccaatacggatcggaatgtttttatcgcgcgcacagtcaaccaccatgcgaatacgctcttcattaccgatattgccagggttaatacgcagacaatcgacgccgtattccgctactttcagcgcaatgcgatagtcgaagtggatgtcagccaccagcggcacgttaacctgctgtttgatgagtttgaacgcttctgccgcgtccatcgtcggtacggagacacggacgatatcagcgccaacacgttccagcgccttgatttgattgaccgttgcttcgacgtctgtcgtacgcgtattggtcatggactgtacggcgatgggagcaccatcgccaatcggcacattcccaacgtaaatacgtgttgattttctacgttgaattggagcctggttatgcatgaaaaatctcccgcgttacccgtctgttactgcgccggtgattgttcggcattgagggtcagacgcgcaacctggttagttctgataaaacgactcagatcgacaggtttcccttgatactggatctgtactgcggctggcgcaccaattttcagtttgtacggtgcctgcccggttaagttcaaattaccgtctttacgctgcataccgctaaacagttttttaccggtagcatcggtgacttccagccagcaatcggcagtaaagttcatcaccagcgcattcgggtcaaccgccggcgtggtcacgccagcctgatcggttggcaacggcgcagcgccatctggtgttgttgttgccgctggtgccggagtcgcagcggtatcaacatttgcctgcgaaggtggaacaaccgcattctgttgcggatcaacagctggtgctggcgcagttacggcaggtgtttgcgtgttggttgcggtggtatccacaggtgatgtcggcgtggtcgccatagcctgatctgtggttgtcgacgtatctaacggtacactctggctttgattattattcagttccgcagaagattgatcggccatagtggtgatctcttcctgctgagctttgtggtcttgccaccaccaggcaccgctcagaccaataaccacaaacaacaccagccaggtgaaggtcatcagccagccgtcacgttttttgcggcgtttaccgagggaaaaactctgcatcggcgcaacttttgcagcccgtagtggagcctgcttttccagccctggcagcagttcttcttctggaatatgtaccagacgcgcataagagcggatatatccgcgcaggaatgttgaagcaagatcggcaggtgccttatcttcttcaatgtcgcgtaccgtggaaaccttcaggcaaagtcgctcggcaacggcctgttgactaagtcctagttgttcgcgagcattacgcaggcgagcgccggtagtaagtgcttcattttggtcgtgcgtggcttcagtattcattcgctgcaggtacgtttaaatgagaattgagatgccggtgaaccatcatgctcacccacaccgcgaaacatccgttaagttaaccgttatcatacagtataagaccgtctgtgtgctcgtgacaaagcccacattcactaaggctaacttactgttgcatcgttacatactgccttaaagtcagcaaaaacgcaccgttaatattgaccagacaattgcaacttaatacttcattcataaaagattacgccacggtacataaagtaaccgtggcgtaatggctatcagaccgctttaatatcgatggcttcaccctgcatccgtttacgcagggtacgtttcgtacggtcgataacatcgcccgccaactgaccacaggcagcatcaatatcatcaccacgagttttacgcacaatagtggtgaaaccgtagctcatcagcacttttgagaaacggtcgatacggctgttcgaactgcgtccatacggcgcgccagggaacgggttccacgggatcaggttgatcttacacggcgtatctttcagtagctccgccagttggtgcgcgtgttcagtgccgtcgttaacgtggtcaagcatcacgtattcaatagtgactcggccctgattggcgttggatttccccagataacggcgcaccgcagcaaggaacgtttcgatattgtactttttgttgatcggcacaatttcgtcacgaatttcgtcgttcggcgcgtgcagggagatagccagcgcaacgtcgatcatatcgcccagtttatccagcgccggaaccacaccggaagtggaaagcgtgacgcgacgttttgacaggccaaaaccgaaatcatcaagcatgatttccatcgccggaacgacgttgttcaggttgagcagcggctcgcccatacccatcatcacgacgttagtgattgggcgctgaccggtgacttttgctgcgccgacaattttcgccgcacgccacacctggccgataatttccgatacccgcaggttgcggttaaagccctgctgggcggtggaacagaatttacactccagcgcacaccccacctgcgaagagacgcagagcgtggcacggtcgtcttccgggatatacaccgtttcaacgcgctgatcgccaacggcaattgcccatttaatggtgccgtcagatgaacgctgttcttcaaccacttccggtgcgcggatttccgccacctctttcagcttgccgcgcaacactttgttgatgtcggtcatctcatcaaagttgtcgcagcaatagtgatacatccacttcatcacctgatcggcgcggaagggtttttcacctaaatctttaaaaaactcccgcatctgctgacggttgagatccagcaggttgatttttccatctttcgtggtgacgttttcaggtgtgactaattgttcagacatatgctattccggcctcgttattacacgttatggcccctggagggttgaaaaaagaaacgccccggtgagcggctgctcgtccgggggcgctgcattgtacaaattctggcgcacggatgccacgtttgcacgcggcatttacgaaattattaacgggtgcgcgggcacacttcgccttcgccgaagaaataagcgatttcgcgagcggcagactcgacggaatcagaaccgtgggtaccattttcggtcaggctgtcagcgtaatcagcacgcagagtaccggccagtgcgtttgccggattggtcgcgcccagcagatcgcggtgacgctgaacagcattttcaccttccagcacggaaacaacgatcgggccagaagtcatgaattcaaccagaccatcaaagaacggttttccatcgtgttcagcataaaagccacgagcctgttcaacggtcaggtgcagcattttggtgccgacaattttgaaccctgcagcttcaaagcgcgcaaagatactaccaatcacgttttttgctaccgcgttcggtttgatgatggaaaaagtacgttcaatagccatttttacctctgtaaattgttctgttgttgtctgtaccagcgtacgagatggcgcggattataatgagcaacagagccgttgactattgatgaaggtaacatttttttaaaataaacccagtttaagcaacaatcagggacaaaatagactattgcatgacaaatttcactgtcgctatttgccccacgtcatccatcaccagcaattgataatcgcctttatccgtcaaatgcagggtcacgttgcgcccacgttcagttaacggttcgccgttcagaaaccaccagcgttcacctgctcctccacttgattgcaacggcaaagtcgctgccgctgcgcccggtaaacgtttaataatcgcgccatcgcgcacacctgttagctgcagcgggagttgtgcatcgtgaccgtatggcgggcaaattgtcgaggccggtggcaagcgcacagcgcgacgttctgatgcgggcagccagggttccagcggtagcggccagacatttatcatttcttgtcgcgcctgagggcaatcagcggcaacacgtttgccgttttcatccagccagatggggaaacgaatgccattaatgccttcctgctccggcagtaatagagttggcggctggctcccgtccagcagccaggttgccaggcggcggcgacagttaccgtcaccttccggcaaagactgtccgcccggccagcagataacgccacgacttacagagtcaggacgtgggtcttccggcaaattcacactgcgcgacagtaagatattattaacctgattcaacagcggtacggcactggcaaagccaaactgaccaacaacgggcgtgccgtccggtctgccagtccagatcccaatgacatagcgagcgttaaccccaatcgcccaggcatcacgatagccatagctggtgcccgttttccatgccagtggggcgacgcgcggcaaggcaccatccggcaagggttgcgcttcatcagccataatccggcgaatgatccacgcagcccccgacgacattaaaggccgttcaagcagcggatcgtcaggctgtaagcgcaatttacctgccttgccgtggcgagcaaacgcggtatacgctgccgccatatcttccagttttgcgccagcgccgccgagaatgagcgaaagattcggtgcagcaccgttgggcaaatataacggcaatccaacattgcgtaactttgccgcaaaccgtttcggtccataggcttccagcacctgcacagcaggtaagttcagcgatcgcaccagcgcctcactcatgctgatcgggccatgaaaaccgctgtcaaagttgccaggtcggtaatcaccggtgcgtctggggacgtcttgcaacagcgatgccgggtggatcaagccttcatccagcgccagaccataaacaaacggtttgagcaccgatcctggcgatcggatcgcattgaccatatcaacatgaccaaagcgtgaatcatcgttgagatcaaccgatcccacccagccgcgaacacgcatatcggtatgatcaaccacgatcatcgccagtgagctgcgcggtggcaatcgtcctttccagttttgcgccagttcttccagacgtcgttgaagaccggcatccagcgtagtaacgattttgtcgcttttgcttttaccgagcatcatgcgcgaaaacagcggtgccagttgcggcatttgtcggggtgccagccagatgggttcttcccttgactcttttacccgctcacgggaccacacaccttgcacggccatccgttcgagcactttattacgcgcggcttcggcacgctccggccaacgatccgggcgaagacggctgggcgcttgcggcaacaccgccagcattgccgcctcggaatagcttaaattcgcaggcgatttcccgaggtaagcccaacttgccgcaccaatcccctgcaacgtaccgccaaacggggcacggttaagatacaaggtcagaatttcacgtttagacagatgccattccagttgcaacgcgcgccagagctggcgaattttgccgccaaacgttttggggtgaggatcaagcaggcgcgccacctgcatggtgagcgtgctgccgccggaaatgacccgacccgacgtgagatcttgccaggctgcacgcgccaccgagaacggattcacccccggatgcttccagaaccagcgatcttcataattgatcagcgcttcaaggtaacgtggagaaacatcttcgattgttactggataacgccagatgccgtcagcatcggcgaaacgccagagtggcgtaccatcctgcgccaccaccacgcgtgcaggattcacttcttgcaatggcagaggccagagtttatctgctgcccatgctgccagaatgatgataaaaggcgcggctgccagcattatccagcagccgcgtttggttaacaggcgaggcatttacggtctgactatcaacagatcgtcagccgcaccagtcgcccgccattgaggaacatacattgattccaccataggctgcggcacctgatacgttcccggcgtcaccgcccgcgccagatacaccagcgttaccggttgatattcatcaacggcaaccgccgccacaaagcgatcgtcacggaactctatgtgcttaatgctcgcctgctgcatctggttcagcaagttctgcacttcaccaccactttgctccaggctggcgctgccgttcgccagattctggttttccagttccagccccgcaggcaacagatccacgactaacgcatccggtacactgttactggctttaacctgcaaccacaccagcaccagatcgccgctacgtaacgagtccagcgatttgctcttaccgtcagtacccagaatatgacgctcaatttgcagcacattgctcgccggtaaaggtgcggattgcggataaccgctggcatccacacgcagccataacggctgatcgccactgttggtcacctgcaaggtggcaagttgatcgctattcagattgctggtttgcgctttctcgcctgtcaacggctcagcagagaaagtggtttgcgcctgccatttgcccggtaaatcctgaagagtacgggcagccaggaacaacgcgttactttcctgcgtcgatagccagcgttcaccgaacgcctgctgcgaaagtgtgtttaacagggagtactgctcatcgggtagcagtttgttctcttccagcaatgagagcatcaacgcgctgtctcgcagtggactaccgtaatcacccagccatatccgctcatcactattacgcggcgttttcagcgccagcgcaatcgcttcttcaccacgcgtcgcatcacccatgattttcagcgcaacgccaagttgcagcagcggtaaaccagaagcggcatctgcacgatgctcccagatttcacgcagcgcacccagtggtgctttttgctgacgggccaacaccagcgcagcgtaagactgtacggcgaatttactggctttgagattatcagcgtacgggatcgacatcatgcccggatcttgtaaatagcgcagcagacgctcattaccccggttaatggcgtctgtcggcacgctgtaaccctgttcgcctgcgcggaccaggaaatccatcacgtaagccgtcagccagtactcttcgtcaccgtttttatcccacaacgcaaagccgccgttatcacgttgcatttgcagcaaacgggaaatgccgatatcgaccgatgcacggcgtttctcatcactgtcgcctttgatgcccaacgcctgcagttgggctgcattggtataaagtgacgggaacaggccgctggcggtttgctcgagacagccgtacggatacgcttttaactctttgatataacgtgcgatgttcagcggtggtttgccactcaacaacaattgcccttccagcgtaacaggcgagaagttttgcaatccatcagccgggagcgcccaggtttcaccaggctgtaacgccgtaccgtaattgaccgtttgtgccgggaatgctggacggacgccgattttccactgcttatgctgatcggcaacggtttccccgggtaacgctaacccgctaatggtggcctgaatgtctccatcgccataacccggcaatgcacgcaccgggataaacagcgtagtacgcacccctggcgctaattcaacaggtgcgggggaattactcaccagttcaagcaagccactggcggtcagagcaacattaagtttttgcggtttatcggtaagattagtgatatccagcgtcaggcgcgaggtatcgccactcgccataaagcgtggcatgttcagttcagcaatcaccggtgcggcaacaatcactttgctttcgttgcttccgaagtcatctgccgtccaggcttgcgccatgacgcgcaattcaccgttaaaatcgccaattggcagtgtaaccgagccttcgccctgttcattgagcgttaccggcagcgcctgctgcgcgacaatattgacgtgattgaccggcggtttaccaccacgtttcagctcatcaccatcgccaccaaaacgcagagctgccagacgcccctgaccttcaatgacctgaccgtaaatatcgtaaatgtctgcgccatagcgtttctgaccaaagaacgcctgccacggatctggcgtgacgtaatcagtaatattcagcacaccgctatcaaccgcagacaccagcacattcacctgttttggcatctcaccatttttattgctggctttaattttcacggttaatggctgattggggcgcattttggtaggggtttccagcgccagatcgaggcgacggttttcatcaccaagcggcagatgcaacaccccaaccgcgcgttttggcgtcgcggagcgagatttatcgccaggacgtaccaccagcgtacttaaatacagatcatgacgattccaggttttatcgaccggaatcgtcagatccagcccttgagccggaacatcaatctcttgccaccacagcggcccttcactggactcgaccatcgcataacctttacccgccgttggcgcggcaatatgcaacttaatggtatcgccagggcgatagctggctttatccagtttcagcgtgacacggtcgggtcgcactgcaccacccccgtcgctgttatcctgccagctataaccagcccagaaacgcacactactgaccgcttcattcggcgctttaacttccagacgataagcgccccactctaccgggaaactgaccttaccggtttcgtccgctttcagatccagagtttgttcattttcgatcagatctttttgatcaaactgtgactgccagccttcatattccgaccagttccagtagtaatcgcggcgttcgcgaatcaggcgcacctgcaagctcgacacggcttttttcacgccttgcgcatcgctataaacgatgtcaaaagcggcgttactaccttcatcaacaatgggctgtttcaccgtgctgtcggtgcgataatcgtaaaccgatttcgaggcgaactgcggacggatccctggcaatgcatcagcaggccagatagcctgctcagcacggcgcgtcaccgggcgaccgcccgattccagcaaactaccctggaaaataacctgtaatggggaatgtgtttccttccactggctttctgtagaaacttcgccgcgccctttatcatccagcgtcaactgaacttcatccagcgtgcgggaaagattttcggcagctatatcgccgaattcaaaaccaggtaaggctgacacagcttcacgcagtgggcgcaggaaaagttgcccttgcaaagtattaccattagcaggtgcgccatacaggtagtaccccaccacggagaatttcacttcatctttcggcgttagcggggttttctcaccggtcagattcagcgccatacgctctggcataaaatcttcgacgtggaaatcccacatccgatactggttatcgcccgtgttagcgcgaatatgccacataccggttgccgcattgctatcgagtggccaggtaaagtggtagaggccattctccggctgactaacgacgctcctgagtacctgcccgtcgggtttaatcacgtctaacttgatgggttgatcgggcaatgctttaccgtctgcatcacgcagcaaaccattgaggatgaccgtttcacccgggcgataaagatcgcgcgggccaaacatgaaaaactgtttgctatagcccggcgcgccagcaatgttaaattccgctaagtccagcgccgggagttttaaatcgagcagcgttgtctgaccgtttttacgcgccagcagtaatgccgcgtttttatcattttccagctgcacatgcccctgagcgtcactgcttgcctgagtcagagtctgccctttctcatttaataaagagacttcaattccttgctgggccgcgccgttttccagactttgggtaaagatatccagacgattgtgataacggtgagctgaaacgccaatatcacttaacgtaaacagcgtcgcgggattactgtaatcgtaacgtccagcctgattcatcacagccagatacacgcccgcctgctgaagcggtttgatatcgcccagcggcagcaataatttttcacgggtgttacgcgcaggattgagatcaaaccgtccggtgtagaccagatccgccatctgcagcagtttatctgactgccagttcgccagcgaattgcggtattcccactggctaatgaaagcgggcagtgattctggtttcacacggaagaagttaacatcgacattgttaacgttaagcgccattaccggcagcccttcaacgaccttaccaggaagcaacgaaccacgactggcaaaaccgacgctgggttggatatcgcgggtagttatagttttttcgtcatctttactaaaggttgcgttattgagcgctttgacctccttgccaatagtgacgatcaaatcacgtttcggttcgaggtggcgtaaacgcagctctttaagattatctgacagctcccaggcaccatccactttgccgctttttttatcgacgacatgaataacgcgtgagaaatcctgatccgggtcgagagggatggagaacgtcagcaccagcgtggctgcgccatcgagttgaacttcagagagatccagcaatgtcagcgccttaccggcactctgttgggccagtttttgtcgctccggcgcggaaagctttgctgaactcacgttttctgaagaggccgctttagtaacttcagaaggcgcatcttttttcaccgctgttggcgcgttatcgttgttgtcgcaccctgccagcgccagcattagcatgcaggaggctacgcgtaactttttcatttttcatccctgccacaatggcccgttagcaacgtcgaataattattatgcgtgagaatttacgttatgtaattcagtatcacgcccatacaatccgaattttagtgagaattgtggctcagacagccaaatcagcctcttttgcttgtcgcttttcactaaacatccgacaatttagcctaaccccggcaaaaatggagatgcctatgtccacgacatggtttgtaggagccgactggctcgccgaacatattgatgacccggaaattcagattatcgatgcccgcatggcgtcgcctggacaggaagatcgtaacgttgctcaggagtatctgaatggacatattcccggcgcagtgttttttgatatcgaagcgctttctgatcacacttccccgcttccgcacatgctgccgcgcccggaaacgttcgctgtggcgatgcgtgaattaggcgttaaccaggataagcacctgattgtctatgacgaaggtaatcttttctcagccccacgagcatggtggatgctgcgcacctttggtgtagagaaagtgtcgattctgggtggtggacttgcaggctggcagcgtgatgatctgctattagaagaaggtgcagtagagctgccggaaggagagtttaacgccgcgtttaatcctgaagccgtggtgaaagtaaccgatgtgttattggcaagccatgaaaatacggcgcaaattatcgatgcccgcccggctgcacgttttaacgcagaagttgatgaacctcgcccaggtttacgtcgcggacatattcccggtgcattgaacgttccgtggacggaactggtgcgcgaaggcgaactaaaaacgaccgatgaactggatgcgatattttttggtcgcggcgtcagctatgacaaaccgattatcgtcagctgcggctctggtgtaacagcagccgtggttttgttggcactcgcgacgctggatgtgccaaacgtgaaactgtacgacggcgcatggagtgaatggggcgcacgagcagatttaccggttgagccagagaaataagcttttaacaggcaataaaaaaccgccgaatttggcggttttttattgctggtctggttcgcggcctttccagcagattggcttgtgttgcatgagcaacgcaggtgcttcacagcaaagcaatactcgccagtaactctctttttgtcaagcgaaagagagtaatcattgtttatttagcgtattatcgacaccggccctttccgccgtctcgcaaacgggcgctggcttaaggaaaggatgttccatggccgtaaatgcaggtgtttcacagcgcttgctatcgcggcaatatcgccagtggtgctgtcgtgatgcggtcttcgcatggaccgcacaatgaagatacggtgcttttgtatcgtacttattgtttctggtgcgctgttaaccgaggtaaataataaccggagtttctccggcaacaatttactggtggttaacaaacttcagagcagcaagtaagcccgaatgccgccctttggggcggcatattttagattatccggttctgtttaaagtcacgcaaaaaaccaccccagcgacgttcatagaatggcgcaatatgttcggtaataaagtggctaattcctttttccccttttttcacctgacaaatatcgattggttcatcgccaggtaatgtatcggtcgctacacttcccgccgcctgaataatttcttcgatatcaccatcggcttcaatgccaataagtaaattaggctgtgcctcttcgctctctttaattaaacaaataaaagcacgcttcactggcttaatggttttaaataaggtggtgagtgaatcaatcatttgtactggcggctctgcgacttccgataatatcagcgattcaccgccttccagtacttcctggctactcagcgaattcccttcttcaccaatcaacaaactgatttcacgcggcataaactctttaccggttggcagtttggcattaaggaagagcgtttcgccaagggtcatctcaaacaatgtgcgaacgggcattacgacaaatgcctgttcgtcttcaaccacctgttgaagtgcttctaacgaggtaaaaaaaggaatgacgctggtgccgtcttctttttcccagtgctgtaaatcaagcgcgctatcttcaactactgcctcgccctgcgccgccgtaccaggcacccagacggtggattccagtagagtacggaaaaaggccgggcggtgcgccggttcggttgctgctttttccagcaggtcttcaagttcgttttttgtttcggacataagaaccataattcattcaacgttcggggcgtaagtgcctgatgcgctacgcttatcaggcctacaagggaaccgcaatatattgaatttgcaatactttgtaggccggataaggcatttacgccgcatccggcatattagtttacgccgttaacagattagcaatcgtgcgcacaccaagtcccgtagcacccgcagaccactgttcaaccggcgctttacggtaagtcgccgagcagtcgatatgcagccaaccttgctgatagttctcaacaaagtgcgacaggaagcccgccgctgtgctcgcgcctgccggatacgccgcgcttccggtgttgttcagttcggcaaagttagacggcaattggttgcggtggaactccgccagcggcagacgccagaacggttcattctcctgcgcggcactcgccaacaagcgaccggcaagcgcatcgtcaaaactgaacagcgcgtgataatcattacccagcgcggttttcgccgccccggtgagggtcgccgcatcaatgatcagttccggtttctgcgcactggcatcaatcaggccatcggccagcaccagacgcccttcggcatcagtgttcatcacttcaacttttttaccgttgcgataggtgatgatatcgcccagcttgaacgcattgccgctgatcaggttatccgcacaacagaggaacagcttcacgcgcttgttcagtccgcgcgtaatggcaaatgccagcgccccggtaaccgttgccgcaccgcccatatccgacttcatcgagtccataaacgcggtctgtttgatgctgtagccgccggaatcaaaagtgatgcctttaccaaccaggcacgcgtacactggcgcttctttatcgccagttgggttgtaatccagcgccagcaataccggagaacgttctgaaccgcgcccgaccgtgtgcagccccatataaccttgctcacgcagatcttcgcctttggtgatccggtaagtcacacgatcccctgcgacgttgctgatcagatcaacagcacgctgtgccagttgcgatggccccagctcttctgccggtgcgttgatggtgtcacgcacccagtcgatgatcatcaggcggttatccagttcctgacgctgggcatcgtccagatccggccactccactttacgtatgcctttcggggctttgtaaccttgccagaatgcccagcagcgatccgcatcccagccttcaccgcttaactgaacatgcttgatgcccagaccgtcaatcttgcgcgccgcacgctggatcaaccccagatcgtctgccccgttcaaatgcagggtaatgccatcattattaatgctgtaagtcgctttttctccccaacgtgcgtcggcaggttggggagagagggtaatcttcatcgcttctgtcattttagttatccttattcgtttaacagcaaaacgggctacccccaggcagcccgttcattcactcggcttcgtccagccagaccaacaaaatcgcttcgaggattttctcgttcgatgcctgcgggtcgtcgtcgaaatcttccagagcgcaaatccactgatgcatatcggtgaatcgaaccgttttcggatcaatatcaggatacgcatcgtacagtgcttcgccaatttcgcggctatcggtccacttaagtcccatactaacctctgttaatgctcacgcgcatggttgatagtgtaacgcgggatttcgaccactaaatcttcgtcggtaacgcgcgcctggcagcttaaacggctttccggctccagtccccaggctttgtccagcatgtcgtcttcctgctctgtactttccggcagcgagtcaaaaccttcacgaacgatgcagtggcaggtggtgcaagcacaggatttttcacaggcgtgttcaatctcgataccgttacgcagcgcaacgtcgagaatggtttcaccgctattcgcttccagaacagcgccatcagggcagagatcctgatgaggcaaaataacaatctttggcatattaaacctcgtccacggaatggcctttcagcgcacgacgaaccgactggtccatgcggcgagcggcgaaatcctgggtttgtttgtctacgtttttaatcgcttgttcgatggcgtcaacatcatcgccctgcgccacttcactcaggtgagcggcagcatcgtcgatagcctgacgttctgcggcgcttaacagcgcggcatcagcagccagcgcaccgtgcagactttccagcacacgcgccgcttctactttttgttctgccagcattcgggcttttacgtcctgctcggcatagctcattgagtctttgatcatcgaggcgatttcgctatcggtcaggccataagacggtttgacctgaatagacgcctcaacgccggtggatttctccatcgccgtcacgctcaaaagaccgtcggcatcgacctggaacgtcacgcgaatatgcgcaccgccagccggtagcgccggaatacctcgcagcgcaaaacgcgccagcgagcggcagtcctgcaccagttcgcgctcaccctgcatcacatggatagacatcgccgtctgaccatctttaaaggtggtgaaatcctgggcgcgggccaccggaatcgtggtattacgcgggataactttctccaccaggccgcccatcgtttcgaggcccagcgacagcgggatcacatccagcaacagcatttcgctgtccggcttgttacccaccagaatatccgcctgaatcgccgcgccaatagcgacgactttatccgggtcgatagaagtcagcggtggacgaccgaaaaattcgcctactcgttcacgcaccagcggcacgcgagtagaaccgcccaccatcaccacttccagcacttcatcagcttctacgcccgcatctttcagcgcgcgacgacaagccagtaaggttcgttttaccagtggcgcgatcagttcattgaattgttcacggctgatttcgccctgccagcccgcaacgttaacggtcacggagtccgcatcgctcagcgcgattttggccgcaatggcagcatcgagcagttcacgctgaacgcggttatcgctacgatcaggaatgcccgcctgctcgcgaatgtaatccgccagcagatggtcgaaatcatcgccgccgagcgcggaatcaccgccggtcgccagcacttcaaacacaccgcgacttaagcgcagaatggaaatatcaaacgtcccgccgccgaggtcataaacagcgatcacgccttcctggccggaatccagcccgtaggcaatagccgcagcggtcggttcattaagtaagcgcagaacatgcagccccgccagacgcgccgcgtctttggtgccctgacgctgggcatcgtcaaagtacgctggaacggtgataacgacaccatccagctcgcctgccagggcttcagttgcccgcgccgccagtgctttgaggatgtccgcagaaacgcgcaccgggttcagcagccccgccgccgtttcaatcatcggcaggccattttcgctggcctggaattgataaggcagatgcggatagcgttgctggatatcagccagcgagcgccccatcaggcgtttaacagaactaatggtgttggcggtgtcgagcgctgcgttagtacgcgcgtcataacccaccgaatgcccttgctgttgatagtgaacaacagatggcagcaggtgacggccttcatggtcagctaacgtttcggcctgaccgctgcgcactgttgccaccagcgagttggttgtgcccaggtcaataccggccgccaggcgacgctgatgcggcgcagcactcaaaccaggttcactaatttgtaataaggccatgtttagcttccagaaattaaaaatcgagcagtttttcttcgagttgttcggcactgctccgcagtttatcgagaaaacgcagcttacgcacggtatccgccgccgcgtcccacgtctcgttgtctaactgttcaaccatcaactgatggcgggtatcaaacatctttttcacacgtttgataaagctttccagccgcgcttcatctttcgcctgttcgatctcgtccagttcttcgcgcagttccagctgttccatcaggaacgcggtgtcgcgcacagtatgctgctcgctggcgagatcaaaaccgtgcaaagaaagcaaatattccgcgcgcattaacggatgacgcagcgtttgccaggcctggttaatggtcgcggattgctgtacggcggcgagttgttccgcctggcttccgctggcgaatttatcaggatgatactgacgttgtagatcctgaaaacgcaggctcagcgcctgggtatcgagttgataacgggcaggcaagccaaagagggtgaagtaatccataacattctcagggctgcgatccgccgcgataacggcgaatcaggtaaaacaaaccccacgcgcaggcgaccacggtggggttatcggtatgcgcatcaaacgtggaagctttcgccgcaaccacactcatctttgacgttcgggttggtgaatttaaacccttcgttaaggccttctttgacgaagtccagctgcgtaccgtccagaaattgcaggcttttgccatcgaccacgactttcacgcctttgtcttcaaacacgatgtcttccggcgtcggttcgtcaacaaattccagtacataagccatacctgaacatccggaggttctcacgcccagacgcaggccaaaccctttgccgcggttagccagaaaggtatttactcgcgctgctgcactgtcgctcagtgtaatcgacataaccaaacctcaactcttattttgcttcacgtttgcttttatagtccgcaatggcggctttgatcgcgtcttctgccagaatagaacagtgaattttcaccggcggcagttcaagttcttcagcaatatcggtgtttttgatagcctgcgcttcgtcgagagacttccctttcacccattcggtgaccagggagctggaagcgatagcagaaccgcagccgtaagttttaaaacgcgcgtcttcaatgataccttcatcgttgactttaatctgcaacttcatcacgtcgccacaggccggcgcacccaccatgccgctgccgacgttctcgtcgttgttgtcaaaggaacccacgttacgcggattctcgtaatggtcgataactttttcgctgtaagccattataaattctcctgattccgataccgattaatgatgagcccattcgatgctgttcagatccacgccctgcttgtacatttcccacagcggagaaaggtcacgcagacgaccgatggatttacgaactaactcgatggtgtagtcgatctcttcttcagtagtaaaacgacctaaagagaaacggatagagctatgtgccagctcgtcgttcagccccagcgcgcgcagcacgtaggacggttcgaggcttgctgacgtacaggcggaaccggaagaaaccgcgaggtctttcagcgccataatcagcgactcaccttcaacgtagttgaagctgacgttgagaatgttcggcgcaccgtgttccaggtcaccgttcaagtaaacttcttcgatatctttgatgccgttccacagacggttacgcaggccgcgcagacgttccatctcggtcgccatctcttcttttgcgatgcgataggcttcgcccataccgacgatctggtgaacaggcagagtaccggaacgcataccgcgctcgtgaccgccgccgtgcatttgcgcttcgatgcgtacgcgcggtttacgacgcacatacagcgcaccaatacctttcgggccatagattttgtgaccggagaaagacatcaggtcaactttcaactggctcagatcgataggcagtttgcccacgctctgggttgcatcaacgtgatagataatgccacgagcacggcacatttcgccgatagctgcgatatcctgcactacgccgatttcgttatttacgtgcatgatggaaacgaggatggtgtcgtcacgcatcgctgcttccagttctttcaggtcgataatgccgttacgctgcggtgccaggtaagtgacttcaaaaccttcgcgctccagctgacggcaggtatccagtaccgctttatgttcggttttactggtgatgatgtgcttgccttttttctgataaaagttggctgcacctttgatcgccaggttgtcagattcggttgcaccagaggtaaagacgatttcacgcgggtcagcgccgaccagatcggcaatctgattacgggcgatatctaccgcttcttcagcctgccagccgaaacggtgagaacgggaggccgggttaccaaaggttccgtccatcgtcataaactgcatcattttctcggcaacacgcgggtccaccggcgtggttgcggagtagtcgagataaatcggtaatttcattgctctataaactccgtacatcactcaatgcaaggaaccaggctaccggctggatgtacgaccgtgtttacggagcgctaaacactccggcctgattctgaattctttttattaagcgcgtaacttaacgtcgatcgcgtcttgtgtgcgggtgcgtggcgcgtcgtgagtatgctgacgaccagacacatccagcacttcctggttattaaccagttcgcctaaagtaatgttgttgagaaaaccggtaaggcggtcgctcaaatcacgccacagcgcgtgggtcaggcatttatccccgccctggcagccgcctttaccctgacaacgggtggcatctacagattcgtcaacggcgctaatcacttcgccaacggcgatgctgctggcatctttgcctaacagataaccaccgcctggtccacgtacgctggaaaccagaccatttttacgcagacgggaaaacagttgttccagataagaaagggaaattccctgacgttcggaaatatcagccaacggtaccgggcccgcttcagagttgagcgcaacgtcaagcattgcggtcacggcatagcgccctttagatgtcagtctcatgtcttacttcacctcaaactcgcccctgcccggggttttttattgtaaaagtgggggtattgcatagcagggtcaagtctgacattcccgagtaaattggtcaactatttacttgactgatttagtcgggtatttaaccttcagtgccatttttttatcgtggcgtttgtacctgttgtcggatgcggtgtgaacaccttatccaacctgagattccgtgcacttacaggcctgataagacgcgttaagcatcgcatcaggcaaccactgttattcggccttgttacctttattctgctgctcaatagaagccagaatcccgcgcaggatattcaattcctggctttccgggcgtgcacgggtaaacagacggcgcaatttattcatcacctgccccggatggttttcacggataaaaccggttgccagcagcgtttgctccagatgaccataaaaacgctccagatcatcgaccagcggatacggtgtctcttcatgctcgacctgctcgccattttcctgagttgccagccaggccatacgcacttcataggcaataacctgaaccgccatcgccaggttcagcgagctgtattccgggttcgcggcaatcgcgacatgataatggcatttctgcaactcttcattggtcaagccaacacgctcacgaccaaaaaccagcgccaccggggtatttgccgcttcagcgacgcttttcagaccgcattcgcgcgggtcgagcatcggccacggcagcgtgcgggagcgagcgctggtgcccaccaccagactacaaccggctaacgcttcgtcgagcgtatcgacgatgtgagcattaccaatcacatcgctggcccctgctgccagggcaatcgcctgggagtcaggtttcactagtggattaaccagccacagattggttaatcccattgttttcatggcacgggcaacagaacccatattgccggtgtgtgacgtctccaccagcacaattcgaatattttgcagcattgtctttcttcatctaaagattattcacgcatcttatcataaaacgaagacagatgccgatctcgctgctatactctgcgccgttttcccgttctttaacatccagtgagagagaccgatgcatccgatgctgaacatcgccgtgcgcgcagcgcgcaaggcgggtaatttaattgccaaaaactatgaaaccccggacgctgtagaagcgagccagaaaggcagtaacgatttcgtgaccaacgtagataaagctgccgaagcggtgattatcgacacgattcgtaaatcttacccacagcacaccatcatcaccgaagaaagcggtgaacttgaaggtaccgatcaggatgttcaatgggttatcgatccactggatggcactaccaactttatcaaacgtctgccgcacttcgcggtatctatcgccgttcgtatcaaaggccgcaccgaagttgctgtggtatacgatcctatgcgtaacgaactgttcaccgccactcgcggtcagggcgcacagctgaacggctaccgtctgcgcggcagcaccgctcgcgatctcgacggtactattctggcgaccggcttcccgttcaaagcaaaacagtacgccactacctacatcaacatcgtcggcaaactgttcaacgaatgtgcagacttccgtcgtaccggttctgcggcgctggatctggcttacgtcgctgcgggtcgcgttgacggtttctttgaaatcggtctgcgcccgtgggatttcgcggcaggcgagctgctggttcgtgaagcgggcggcatcgtcagcgacttcaccggtggtcataactatatgctgaccggtaacatcgttgctggtaacccgcgcgttgttaaagccatgctggcgaacatgcgtgacgagttaagcgacgctctgaagcgttaatgactcaggcgggtgatatcactcacccgccctcgcctttcaggcgctattccgaaatacttcctcaccgctttactttctttcgtcactctcccaccatctttccccgattaatggatgataaagaagtcgcaaggaaagattatggcgctgccagtgaacaaacgcgttctcaaaattctgtttattctctttgttgttgccttctgcgtttatttagtgccgcgcgtcgccatcaacttcttctattatcctgacgataaaatatacggtcccgacccctggtcggcggaatccgtcgaatttacggctaaggacggtactcgtctgcaaggctggtttattccttcttcgacgggccctgctgacaacgccatcgcaaccatcattcatgctcacggcaatgccggaaatatgtccgcccactggccgctggtcagttggttacccgagcgtaatttcaacgtttttatgtttgattatcgcgggtttggtaaatcaaaaggcacgctgtcccaagccggattgctggacgatacgcaaagtgccatcaatgtggtgcgccatcgcagtgatgtaaacccacaacggctggtgctgttcgggcagagtattggcggggcgaatattctggatgttattggtcagggtgatcgtgaaggcatacgtgcagtgatcctcgactccacctttgcctcttatgcgaccatcgccaaccagatgctccccggcagtggctacttacttgatgagagttacagcggtgaaaattacatcgccagcgtcagcccgatcccgcttttactcattcacggtaaagctgatcacgttatcccatggcagcacagtgaaaagttgtatagcctggcaaaagaaccaaaacggttgatcctaatcccggatggcgaacacattgatgctttttccgatcgtcacggcgatgtttatcgcgaacagatggtggattttatccttagcgcattgaatccgcagaactaacccatgatcgctagcacgataatcattcacaaaaccaccttaagacatgctaatccactggtcagaacagtttaagatgagaaaaattctgtgacgcttgccaacatttctgatgattagcattcccttcgccatttccctgagcaaactttagctattcttatcaattatgcttatgggagatctacagatgatgcctacgcttgctccaccatctgtcctttcggctccccagcgccgctgccagatcttgctgacgctctttcagccggggttgaccgccaccacggcaactttcagcgagcttaatggtgtggatgatgatattgccagtcttgatatcagcgaaacaggacgggagatcctgcgctatcatcaactcacactgactactggttatgacggtagctaccgggttgaaggtacagtgcttaaccaacgtttgtgtttatttcactggctacgacgtggtttccgtctgtgtccgtcatttattaccagccatttcacccccgccctgaagagtgaactgaagcggcgcggaattgcgcgtaacttttacgacgataccaatctacaagcgttagtgaatctctgctcccgacggctgcaaaaacgctttgaaacgcgcgatattcatttcctgtgtctgtatctgcaatattgtttgttgcaacaccacgctggaattacgcctcagtttaatccgctccaacgtcgctgggcggaatcctgccttgaatttcaggtagcgcaggaaattggacgccactggcagcgtcgggcgctccagcctgtaccgcctgatgagccactgtttatggcattacttttttccatgttgcgggttcccgatccactgcgggatgcgcatcagcgggacaggcaactgcgtaagtctatcaaacgtctggtaaaccactttcgtgagctgggaaatgttcgtttttatgatgaacaggggttatgcgatcagctttatacccacctcgcccaggcgttaaatcgcagtttgtttgccatcggtattgataacaccctgccggaagagttcgcccgcctgtatccacgcctggtgcgcaccacccgcgcggcgctggctggatttgaaagtgaatacggcgtccatctttctgatgaggaaagcggtctggtcgcggtgatttttggtgcctggctaatgcaggaaaacgacctgcatgagaaacagattattctactgaccgggaatgatagcgagcgagaagcgcagattgagcagcagctacgcgaactaacgttactgccgctcaacattaaacatatgtcggtaaaggtatttttgcagacaggcgctccgcgcggcgcggcactgattattgctccttataccatgccgttaccgctcttttcaccaccgctgatctatacggacctgacgctgacaacacatcaacaggagcagatccgcaaaatgctcgaatcagcatgagggaacaactttcgggcgcaaaaacattgccggaagcgccaccagcgccaccacccagaacacgccgtggccgagatattgatacaggaaaccggcgaaaacggtcatgatggcgatactgccgcccatcgcgacggcagagtaaaccgcctgtaaacggatgacttcgctaccctggcgagcagcaatatagcgcatggcagccaggtggcagaccgtgaaggtaccgcaatgcagaatttgcaccactatcaaccacggcaacgccgtagttgctcccataatgccccagcgcactacgccgcaaatcgccgagatcaacagcatatcgcgtgcactacaacggcggaaaagtttattactcagcgcaaagataatgacttccgccaccacgcccagcgaccacaaataccccaccgccgaggccgagtagccagctgcctgccagtaaatggcgctaaaaccgtaataggccgcatgtgccccctgcaataaacaaacgcaggccagaaaacgccagttctggcgaaccaacgccaaccacgcagaccagccggtgctctcctgctggcggcttgccccttgtggctgaatcgtcggacggatgagaaagccgagcagcatggatgccacgcccaacgtcaacagcgcgaggatcacccgataatcaaacatactgaccagtttgcccgtcagcgccgagccaatgacaaacgccaccgagccccacagtctcactttgccgtaatcaagcgggaactgcttttgccacgtattcgccagtgcatcggtcaacggtaccagcggtgagaaaaagaggttaaagccaatcatcaccagcatcagccacgctacgtgcgcccccgcccagaaggcgacagcaaagagaagtgtcagcagtgccagcacgcgcaaggcggaaatcaggcgggaaggatcgctgacgcggggcgcgatgagcaaactcccgaggaaacgggcaaccagacccgcccccaataacaggccgatggtttctggcgttaaaccaatccctttaagccagacgctccagaaaggtagaaaaatgccgtaactaaaaaagtatgtgaaatagccgagcgccaaccagcgcgtggattgcaaaaccatgagtccctcccgtcaggaggcgttagtctgaggttaatcgaatgttggtgcaagttgaaaaataagaatattcgagcctgcttcctgacggttatcctgcatatcaggaaatgacaaaaaagagcggcccacaacacaacatgtaaaaaagaacgatgaaacaggtgaaaatcgcaatttattgaactgacaaactcatgtgagacggataaggcgtgcatgtcgcatccggcaggaaacaataagcacattgtcagccatctgcgttatgccgttataccagaaacgaatatctcaacgcctgggcgtggcgaggtaccagagtgtgtattacgtttaaatcacatcatcttgcaaagggattggttatgaactcactacgttattttgattttggcactgcccgccccgttttattattaattgcccgtatcgccgtggtcttaattttcattatttttggttttcccaaaatgatgggctttggcggtacggtccaatatatggcctcgctgggcgcgccaatgccgatgctggcagcgattattgcggtagttatggaagtgcccgccgcgatattaatcgtgcttggctttttcacccgtccgctggcggtgctgtttattttctacacgctgggtacggcggtgattggccaccattactgggatatgaccggcgatgcggttgggccaaatatgattaatttctggaagaatgtcagtatcgctggcgcattcctgctgttggcaattaccgggccgggggcgatttctctcgatcggcgttaggaaagatgccggatgcggcgtaaacgccttatccggcctaccgctccaacaccgattgtaggcctgataagacgcagcaagcgtcgcatcaggcatcgtgcaccgagtgctacaaaatcgaaattaccccgtaggcctgtgcatccggcattttataaattacagcaacgcaacccgcaacgacatctctgaaattgttgattcccctggtgcaagcgcaatgaggtcaccaccttccggacgatgatggtcatccggcgcatgactcatcggttccagacagaagaaatcaaacgcatatcctttatcaaacgcagggtctgaaacaaagatgaaataacacggtgcaggtggcgtcgtttccatgatgatggcataaccctcctgcggctgctcgatgcgggcctgaccattccatccggcaaaaccattgtttacccactggtgcggcaacggcgtgagctggttaaaatccagttcctgcggtagctgctcgcaaaactcacccgccagccactgctctcgctccagccagtaaccgctcgcctgtgcctgaacccgcgtttgcggcgacaacggaaaataaggatgccagccggtaccaaatggcagcgtctctgccccttgattggtgacagcgagcgtcaccgtcagcgtatccgccgttaaatgaaatgcctggcttacccgatagtgataaacaccgctgagatgttcatacaccagacacaagctatcatcgctgcgcgagacacattgccactcgcccaaccagccatcgccgtgtagatagtgcgcatcccactcaacattcggttgcagttgatactcacgcccctgccagacaaaacggttgccgctcacccggtttgcaaatggtaccagcggaaaacaagaggcatcggttgccacaccgctttttttaccaggacgtagcagcggcgtcgtatcgcgccagaagccttcgattacgccgccctgatcagaaacgtccagctttagcagcccgtgagatagggtatagatggtcatccgcagactccttaatccgggaaattaatcacaactttcccgcatttgccgcttgccatcagtgcataagcatctcccgcctgttccagcgagaagcggtgggtaatggcgttacgcggccacagtttccagtccgttaaatcgtgggcgcatttttccatatggaacagactggtcacccaggagccgataatccgccgttgatggtgcatcaggtcggcgctaacctcgaactcgacttttccggtttcaccaatgtaaaccacgcgtccccagtcagcggtggattgcagtgccagtaagcgacctgcggcattaccggaacaatcaagcgcaacatccgcgccgccgtgagtgagttcggcgattatctgcggcataccttcggtggtcgctaaatagccgtgatccatcactcctaactgtttcgccatcgccagacgttccggcaacatatcaacgccgatgatccgttttgcaccgcgacctttcgccagcatcatcgccatcatgccgaccggccccagaccaaccaccaccacgttatcgctaccggaaacctcgccgcgcaaaatcccttcatacgccgtaccaacaccgcaactgataaacgcgccatcttcgtaactcagcgcgtctggcaggaggatcagatctttttcttccgccagtaggtattcggcatgaccgccgtcacgctgccagccgtaagccgcttttccttcgccagtacaagaaataggaaaaccgcgacggcagttcgggcaaaaaccacagccagaaatgtgatacaccagcacgcggtcgccctctttaaaatggcgacagccttgccccatcgccacaatctgcccgcacggttcatgaccgttgataaatccctggtataacggtttatcgggtgccgccgccgtagcgcggtgctggtggtagatatagtggacatcgcttccgcaaatcccggaggatttcattttgatcagtacctggttaatccccggcgtcggcaccgcaacttcccgcagatcgacggtcgaatttcctggtaaataagctgccagcatcgttttcataaatccctcattaacaatacgattaattttcatccctgccgcacccgcgccaggggcgttaaggtttagcgtttcgctttactgctacgctgggtcagcaagatattcgccagcaccgccaccacgatgatgacgccgcgcaccacctgctggaaaaaggagttaatcccgagcagcaccagaccgttaccgattagcgtaatcaccagtacgccaagcagcgtaccgaacaacgagccgcgaccgccggaaagcgccgtaccgccgaccacgaccgcggcgatgacgtcaaactccagaccgtttgcggcacctgcgttaccggaaccgaggcgggccgccaacaaaatgccggtcaccgccgctaataatcccgaaagggtaaaaataagaatgcgtacccgacgaacgttaataccgcacaactgcgctgcagtggcattaccgccaacagcaaaaaccgagcgcccgaaggcagttttgcggctaatgaacacaaacagcgcaaataacaccatcatgatcagcgcggataccggcacaccgagaaattgtccgcccagccaatccagcacttcgttttcgttaattggcactggcaaggcgttcgtcataaacagccccattccgcgcagggcgctccataaacccagcgtggcaacaaaacttggcacgctaaacacgccgcgcagcaccccggcgagcgttcccatcagcgcacctaacagcaacaccagcagacaagcaatcgccagcggaacgtcaaattgcagcaaaaacgccaggcacactgaaacaaaagccaccatcggcccaacgctgacatcaatttcaccggagataataatcagcgtcatcgcccaggcggcgatcccaatggtggcggcatcgcgcagcacgttcatctggttattcaatgagataaagccaggcgcattcagggagaagaccagataaagaatggcaatcaccaccagcaaaccgatctcattaatatggcgactgacaaattgtttgagcgagacgctcttgccctgcggcaatggtaatgacgaagcagacatcttcaggttcctcggtaaaattcatcagtgcacagacagaatggcggacatcagctcatccacattgaccggagagtgaaactcctgcgagaacgtgccgtgctgtaataacaggatgcggtcacacaccagcggcaactcctccacttcactggagataaacaccacgctttttccttcggcagccagctcgcggacaatacggtaaatctgctgtttggcttcgatatcgacgccgcgcgttggctcgtcgagtaacaaaatctggctggcggcatagacccaacgaccgatcaccactttttgctgattgccgccagaaagcgtgccgatgggcgtttcgctactggcggccttgaccgtcatccgctgcatcacctcttcggtcaggcggcggatggtggaccattgcagtacaccgttggcgctgattttttgccgattggtcagcactgtattttcgtcaacgcccaaccagggaatgatccccgcttctttgcggttttctggcgtatagccaatgccgcgtttcagcatgtcgccgtaatcggggcgcgtgattttctcgccgttgataacaatttcgccctgttcatacgtctccagcccaacaatcgccttcagcaattcactgcgccctgcccccagcagaccagcaatgccgagcacttcgccacgacgtagtgtaaaactgatatcctccagcttgggcttatggcgtaacgcacggacttccagcacggcctgatccacaatttcctgaggggcaaccggcgcaatatcaacgtgatcgcgcccgagcattagcgacacaatatgatgcgtagaggtgtttttgagcatcacatcgcccgccacctgaccatcgcgcataacggtggcacaggaggcaatgcggcgaatttcttccatccggtggctgacataaatcaccgccacgcccagtgccgacatctttttcaccgcgctgatcaccagttcaacttccgcactggcaagcgagctggtgggttcatcaagaatgaccacgcgcggctcgcccttcatcacccgcgcaatttccaccagttgcttttgcgccgggcttagtgttgaaacaagttgttcaggactaacgtcaacgcccaacgcctgcaagcaacgttgggcgtcctgcgccatttgcaggtaatcaatcatgccgttgcggcggggccactgaccgaggcagaggttttccgccactgtcagcccttccaccagacttaactcctgataaaccgcacgaacccccagttcagcggcacggcgagtcagcgtagcttcgtcaccttccagtcgcgtctcgccaatccagatatcaccgctatccggacgttcgctaccggtaagcattcgaatgagggtcgattttcccgcaccgtttttgcctaacagcgcgcgaacttcgcctttattgagcgtgaagttaacgttatccagcgcaacgacgccggggtaacgcttatttcctgccaccacttttgctaccgggactgcctctgttgccgtgaacatagggacctctgcgaatcagcgattagggcagaccatcaacgtgcgttgccagccactgtttaccgtcttccgttttggtatagagatcgattggcacctgaatcactttttcaccgtcggcttgtttattgataaccttcaatgtttgcgtaaaaacagcattgcccattttcttaccggaaatatccaccaccgctttcagcacctggttgttttccagctcctgagcaatttcagtggtcatatcagaaccgaaaacagcaatttttccggcctgattttgattacgtaccgcttttaccgcgccgagtgtcgctccgcccgattcccccataatggcgttgagatccggcgtggagataatcagtttttcaccgacagaaatcgctttatctaaaacagtcccttcctgattagcgacaatttgcgcgccgggaacgcgggcttttaatacttcttcaaaccctttacgtcgttgcacacaaacttcaaaggcttcgcaattgatgacggcaattttcggctggtcaattttgttggcaataaaataatcggcggcagcgttacccagttttttaccaaattccagcgggtcaccaaccagatatgccgagacatatttatcgacacccttttgattaatacaggtgttgtagcaaatcactggaatgcccgcctcactggcgcgacgaacggtgcggctgctgccattttcagaaacagctgacaaaataatggcatcgacattacgcgccacgagggtatcaacaaaggtactttctttcgaaatatcaccctgggcgttagtttcaattaactgtacctgtactgaagaatcttttgccgcatcctgaacgccctgacgcactccggcgtaatatccctgggtatcaaggtatattgcgccaatagtcatttctttatcagaagccctggcaaatagtgcgctacccaatagcgtagccattaataataaattacgggttcttgtcatttttttaggcatagtgcctcctgtagggtttttatttacaacggcttattttaattatttgagcgtgagcggcagcgcgtgccgctcaaatattacagttaatagggtttagtgaacgtagctaaaaataaaaggcgtcacggtggtgaataatgccgctttcggccaggctggattaatcgccatcaattcagcgcgagcagattcatagtgcgcaacctcccctaatcccgcggccgccagcatcgccaccatcaggcatttttctttatgctgctgttgtaaatcgccatacagcgacaacaagtcaggctgcgagacggcaaagaaatccgcttcgatactggttttcgccatctcttgtgcccactgtttcatttcactaaacagttgctgtgcggtgtgttgttcgcccagcagtcgcagcgccattccttgccagaagagataatcaaccggctgatcgttgtaataactgtggatgttaatggtgcgatcgccggtcgccgccagacgtaaacaacgcgtcgcttcagtttcatcgccctgcgcgttggcgcatactgcctgccagaaccagatgtcgttgtcagtttgccccggtaaacggccttcgcttaaattctccggataatgcagcgcggcatgaagcagttcgctggcctgctgcggctctctggcatcaagatgctgccaggcgcgtaataactggttgaggataaactggctggtgaccttcccttccccaccttcccacgggtggaatttgcgcgtggcgagaatgtccgccgctttgtctgcctgaccagtgagatgccacaaattgagcagttctgcggtcatgtcgtcgcgtttcagcgcaatttccagattattttccagacgcgccagtcgtttctccggtgtgacaccgcttaacttatccagcaaatcccgttcgaaaagcagacgtgcatcctgcggcgcaagctgataagcattatcaagataacgcgcggccagctcataatcgtgctgcttattccacgcatggatcgccaacccgcgccagccgtcggcaaactccggcgacatctctacgcaacgctgccataaggcaatggctttgccgtagctacgcttgttgtagtagaagcaggccagtaaatgccgggcaaaccagcactcttcgatactctccagcgccgccacttcttccagcgtattcgggaaacggacaaactgcgggaaggcatcaatagcttttacgaccagttctccgcgttcagcttttggtagcaaactggcttgcaggtaaagcggtagcgtgcgctgacagtccagtgcgttcagcatctctgccgccagggcgggcatgccccagttaatcagttgcccggcggtcatcagggcgttaacgtcgcgtccctgacaaagacctcgccactgcgcgagggctgattcgctacgaccatcgaaccagttcagccaccacagagtggcgttcagcggataatcacgcagcagtttctcgcgctgcaaacgcgcgttgtcctgacgaccacttaacaccagtagcaggttatgcaggcaaagcacttcctgattggttgggcaggcgcgaagactttgttggcaaaaatccagaccagtgtcgaagttaccattacgcgccgccagtcgtgccagaccataatagccaccggctttactgttgccgctccagaccgcacgccagaaatcctcttcggcttgttgatattgcccctgacgttcgtaagcactggcgcgaatcaaactcgcctgtccgcactgcggatttttgttcagcgcatgtgcgcgtttcagtgcctgactggcatataccaccgcttgcgggaaatctgcacggttatattccagcattgccagcgccagattacagcgataatccagcggatccagcgccacgccgcgcaggtagtaatcgaacggtgaacggctcgcgtgatgatattgctccagatgttgaccgataaaccaggtttcatctgtactggtaatgtcttgtgctgccagtggcgctttggcgacgtccggcaacggcaacacttgcggctgatgttcctgataactcagtatgatattgccgtcggcatcggagagctcaatggtcagcctttcaggattgataccgtgcaacacgccctggatggcggtcgctggcatcagtgccacggcatcatcaagtaacgcgttgcatttgccgatttcgcggatcgccaggcggtatccgttcaacggagagatggcatacaacccccactcaatcccccgatcactacgctggagttttatcaccgcatcgcgggaggcgttttgcaccatgcccaaagaatggtaaggcaggaaatactgctcaaaacgcttctcttcataagcatcaagccaggtaaaatcgggctgattatccgcaaaaatgccggtcatcagttcgatatacgggccgttattgtcggtcagactcttatcccacgcctggccaaattcactgtgtccccagctccactgttttttacctggcgcgatatggtggttggcaacgtgtagcaaaccgccatcttcatcgtgacaccacgcgccaacaaaatcgtactgtgatttttcagccatatatgaggttggaacgggcacatttttatagcgagaaatgtccactccggcggagtagtccactttgtagtaagtgccggtggcgatggggaaagcagagacggcccgtttgccgtgatcaaacaccgccgttacatccggcgggaagacgctctgatgcccttcaccccctttcactgccgggttggcccaccacaagaaatgacgcggcgtggcgttgccgttatagacgcggctggcaatttccagtgccgcccggtcagggcgcagggtgaaacctgtcatcacctgtaaaccgtgcatcggctccgtttcgccgacccacacggtttgtgcgccgtcttcatgggcttcgagggtgaaatcgacgggcataaaggtggtcgggcgatggtgttgcggccagttaaactcaatcccgccggagatccacggccccagcagccccaccagcgccggtttaatgacttcattgtgatagacaaaatcgcgctgtttcactttatcccatgcgcgatgcacccgaccgcccagttccggcaggatcatcactttgatgtagtcgttttccagccacaccgactgccaggatttcagggttttctgctcgctcagcgtatcggtcacgccgtagggataaaccgcgccggacgatccctgataaacgcgattttccaggaacatgggatgtatatcctgcggcccggtttcataggtcgggatctcaacgcgctcttgccacacttttactggagtcatggtgccctcaatattaacaagacatactgaattaaaagatttgtggcagtgtattgaacaatctggcaatgttttcgcggaataatcacgcaattaactaaacaaggtttagtgaagatgagagcctgcattaataatcaacagattcgccaccataacaaatgcgtgattctggaactgctgtaccggcaaaagcgcgccaataaatcaacgctggcccggctggcgcaaatttcgattccggcggtcagtaatattttgcaggaactggaaagcgaaaaacgggtggtgaatatcgacgatgaaagccagacgcgcgggcatagtagcggtacatggctgattgcgccggaaggtgactggacgctgtgcctgaacgtgacgcccaccagtattgagtgtcaggtcgctaacgcctgtttaagtccgaaaggtgaatttgagtatttacagattgatgcaccgacgccgcaggcgctgctgtccgaaatcgaaaaatgctggcatcgccaccgtaaattgtggccggaccgcaccatcaatctggcgctggcaatccacggtcaggttgatccggtgactggtgtgtcgcaaaccatgccgcaagcgccgtgggcaacaccggttgaggtgaagtacctgctggaagagaagctgggcattcgggtaatggtcgataatgactgcgtgatgctagcgctggcggagaaatggcaaaataattcgcaagtgcgtgatttctgcgtaatcaacgttgattacggcattggctcgtcgttcgtgattaacgagcaaatttatcgcggcagtttgtatggcagtggacagattggtcacaccatcgttaatccggatggcgtcgtctgcgactgcgggcgttatggctgcctggaaaccgtcgcctcgttaagcgcattaaaaaaacaggcgcgggtatggctaaaatcacaaccggttaatactcagcttgatcctgaaaaattgactaccgcgcagttaatcgctgcctggcagagtggagaaccgtggatcaccagttgggttgaccacagtgccaacgccattggtttgagtctgtataacttcctcaacatcctcaatattaatcagatttggttgtacggtcgcagttgtgcctttggtgagaactggcttaataccattattcgccagacgggatttaacccgttcgaccgcgacgaaggaccgagcgtgaaagcgacacagattggctttgggcaattaagccgcgcacaacaggtactgggaattggctatttgtatgttgaggcgcagttacggcagatttgatggcgcgataacgtagaaaggcttcccgaaggaagccttttttcaacagattaaccgtttcgcttatgcgtaaaccgggtaacgtgcgcagatgtcgagaactttacctttgatgcgctcgataacggcttcatcattgatgctgtccagcacgtcacacatccagccagccagttctttcgcttcggcttctttaaagccacgacgggtaatcgccggagtacctacacgaataccggaagtcacaaacgggctcttcggatcgttcggtacgctgtttttgttcacggtgatgttagcacggcccagagcggcgtctgcttctttaccggtcaggtttttatcaaccagatcaaccaggaacaggtggttatcagtaccaccagaaaccactttgtagccgcgttcgaggaacacttctaccatcgctttggcgtttttcgcgacctgctgctggtaagttttgaactcaggttccattgcttctttcagagcaaccgctttaccggcgattacgtgcatcaacggaccgccctgaccaccagggaaaacggcagagttcagttttttgtacagctcttcgctaccacctttcgccaggatcaggccgccgcgcggacccgccagggttttgtgagtggtggtagtaacaacatgagcatgaggaaccgggttcgggtagacgccagcagcaaccaggcccgcaacgtgcgccatatcaacgaacaggtaagcaccgatgctgtcagcgatttcacgcattttcgcccagtcaaccacgccggaatatgcagagaagccaccgataatcattttcggtttgtgttctttggcttgtttttccagatcggcgtagtcgatatgaccggtagcatcgataccgtaaggaacgatgttgtacagtttaccggagaagttaaccggagaaccgtgagtcaggtgaccgccatgcgccagattcatacccagaacggtatcgcctggttccagcaacgcggtgtagaccgcaaagttagcctgggagccggagtgcggctggacgttagcgtagtcagcgccgaacagttctttcgcacgatcgatcgccagttgttcaacgatatcaacatactcgcaaccgccgtagtagcgtttgcccggataaccttcagcatatttgttggtcagctgagaaccctgcgcctgcattacgcgcgggctggtgtagttttcggaggcgatcagttcgatgtgctcttcctgacgtactttttcctgctccatagcctgccacagttcggcatcataatcggcaatgttcatttcacgctttaacatccgcatctcctgactcagctaacaataaaatttttggcctttataggcggtcctgttggacaacggcgaacagtataaccgaatcattgtgcgataacaggtcttgacaaaggaatttacgcaaacgattaccttcaggctacgcaaggctttggagaataaagagcttgcaaccggaaacggatttcttttcaggtttgtgatgcaaatttttcacttcatcacattctttctgaaaaacaccaaagaaccatttacattgcagggcgtattttttataagatgcatttgagatacatcaattaagatgcaaaaaaaaggaagaccatatgcttgacgctcaaaccatcgctacagtaaaagccaccatccctttactggtggaaacgggaccaaagttaaccgcccatttctacgaccgtatgtttactcataacccagaactcaaagaaatttttaacatgagtaaccagcgtaatggcgatcaacgtgaagccctgtttaacgctattgccgcctacgccagcaatattgaaaacctgcctgcgctgctgccagcggtagaaaaaatcgcgcagaagcacaccagtttccagatcaaaccggaacagtacaacatcgtcggtgaacacctgttggcaacgctggacgaaatgttcagcccggggcaggaagtgctggacgcgtggggtaaagcctatggcgtcctggctaatgtatttatcaatcgcgaggcggaaatctataacgaaaacgccagcaaagccggtggttgggaaggtactcgcgatttccgcattgtggctaaaacaccacgcagcgcacttatcaccagcttcgaactggagccggtcgacggtggcgcagtggcagaataccgtccggggcaatatctcggcgtctggctgaagccggaaggtttcccgcatcaggaaattcgtcagtactctttgactcgcaaaccggatggcaaaggctatcgtattgcggtgaaacgcgaagagggtgggcaggtatccaactggctgcacaatcacgccaatgttggcgatgtcgtgaaactggtcgctccggcaggtgatttctttatggctgtcgcagatgacacaccagtgacgttaatctctgccggtgtcggtcaaacgccaatgctggcaatgctcgacacgctggcaaaagcaggccacaccgcacaagtgaactggttccatgcggcagaaaatggcgatgttcacgcctttgccgatgaagttaaggaactggggctgtcactgccgcgctttaccgcgcacacctggtatcgtcagccgaatgaagccgatcgcgctaaaggtcagtttgatagcgaaggtctgatggatttgagcaaactggaaggtgcgttcagcgatccgacaatgcagttctatctctgcggcccggttggcttcatgcagtttgccgcgaaacagttagtggatctgggcgtgaaacaggaaaacattcattacgaatgctttggcccgcataaggtgctgtgatttgatgttgccggatggaaacatccggcaacccttgacccgttttaaatcgccgcatcatcctcttcaccggtacggatacgaatgacccgtgccacgtcgaagacgaagattttaccgtcaccgattttgccggtttgcgccgtgcgaataatggtatcgacacaggtatcgacaatgtcgtccggtacgacaatctcaattttcactttcggcagaaaatccaccatatactccgcaccgcggtacagctcggtatggcctttctggcggccaaaacctttcacctcagtgaccgtcatgccggtaataccgacttcagccagtgcttcgcggacatcgtccagcttgaagggtttaataatcgcatcaatctttttcatgctattccttgaaaaggtcgcctgtcttttgatctgctaaacgtaacacataacgccaattcattccttgaaatcgtttgcatccagttcgtgtcgggaaagcagtttataaaattctgtccggttgcgccccgccattctcgccgcgtgggtgacgttgcctttggtgatttgcagcagcttacgcaaatagttgagttcaaactgattacgcgcctcaacaaaggttggcagcgccgtgttttcgccctccagcgcctgctccaccagcgcatcactaattaccggagatgatgtcagcgccacgcactgttcaatcacgttgaccaactggcgcacgttgcccggccagctcgcagtcatcaggcgtttcattgcatcggtggagaacgcgcggacaaacggtttatgtcgctctgccgcctggcgcaacaggtgatttgccagtagcggaatgtcttctgtgcgctccgccagggccggaattttcaggctgacaacgttgaggcggtaatagaggtcttcacggaattccccgcgcgtcatcgcttttggcaggtcgcggtgggtcgcagaaataatccgcacgtcgatatcaatatcgcggttactgcccagcgggcgcactttacgctcctgcaacacgcgcagcagtttgacctgcaacggtgcgggcatatcgccaatctcatcgagaaatagcgtaccgccttccgccgcctggaataaaccttcgcgattgctgacagcgccagtaaacgcgccacgtgcatgaccaaacagctccgactccagcaattgctcgggtaatgcgccacagttaatagcaataaatggcttgctgttgcgcgggctggcgttgtggatagcctgggcgaaaatctctttcccggtgccgctctggccgttaatcaaaacgctaacgtctgattgtgccaccagccgcgcctgttccagcaagcgcagcatcagcgggctgcgggtgacaatcgcctcgcgccaacgttcgtcggtggctggcgcggattgttccagcgcatcgtcaattgcctgatatagcgcatctttatcgacaggcttggtgagaaaactgaacacgccctgctgtgttgcagcaacggcatcaggaatagaaccatgcgcggtaagaataattactggcattcccggctgcactttctgaatttcagcaaatagctgcataccatccatttcatccatccgcaggtcgctgatgactaaatctactttttcgcgattcagtacccgtaatccttcaacgccactttccgccgtgaccacgctgtagccttcgctggtcaggcgcaggccaagcagtttcagcaatcccggatcatcatcgaccagtaataaatgcgcaggtttatggctcatcaggagtgacctcatcggtggatggcgcgggcttttcactctcgtgcggcgtatccggcgagaaatttccagccggtttgcgggtcgagagctggcgttcaatatcggtcaggttttccagcttgcgggtagtgagttccagttgctgttgtagaacgtgatgttgctggcgcaaagtatccagctcgctgtcgctggactgctggagtttgctgtagcgttggcgctcttccgccagttgcagttgcagcgcctgaccgtcgcgccagagttgatacagtgggcgaacctgtgccgggatctcggtacttagcgcatcaatgcgcgcgaccagctggcggcgctcatacggcgtaattttggcgtcggcgagcaaaatcccttgtttaaaggtattttgccagttgccgtcgtcatattggcgggcttgctgacgcgactgcgcaggcattaaacgatcagcacaatccatcgcccgcagccagtaaagcggattggtttcggttgatttaccttgcagcgcccagatgtcgctacattcagtagaaagatagtcagccagttgataaaccggaattttttcttctgctggcgtatcaatggctggcttattgtgactctgcacgcaacccagcaatgccagacatggcagccctgccagccacagccgtcggggcaataatcgttgaaaaatgtgtcgcatattcaccagacttaaagcctatcccagtgggcgtaattgttgcaggcagtttggacatggacagcgcggagaaaccagagcgtacatgtcgtacgtgaagatttcgagcactgcccggggccgaactgacaaataaaatagcctgatgggatgggctgttagcattatttcgtgtttttcgacgacggtaattcaatgcggaaacaaacgtcttgcccgctctcgtcgaccagatacagttccccttgcatacggcgaatacaatccctggcaatgcttaatcccagaccgctgcccttcaccgccccttttcgctggtggcttccctgaaaaaagggttcgaagatcatggcgcgttcctcttgcggaatgggcgtgcctgtattgatgacatcaatataaacccgcgcaccatgtaaactgctgcgaaggcaaatgttaccggattcagccccgtagtgcaccgcattggagtaaagattatccagtacgctcatcagcagcattggctccgccaggcaagctgttgctttgagatcaacgtcggtatgcatcattttagcccgtgcgggcaggctatgagcagaaaccactgtctccaccagcggtgctaactcaacattctccagttccaccgcactgtccgcctgtttacggttgtaatcaagcagttgttcgatcagcttttgcaaattgcggctgctgctatcaagaatgctcaccacctctttttgctctggcgtaagcggcccgacaacctgatcagccagtaattcagtgccctcgcgcatactcgccagtggcgtttttaattcatgagataaatgtcttaaaaattgatggcgttgggattccagccatgacagacgctcacttaaccaaagaatacgttgcccaaccgagcgtaactcgctcggtccactgaacgagacgctattgcccagagaacgcccttcccccagccggttgatcatgcgctcgatatttttcaccggaccgataatcatcctcgtgaaaagcagtaccatcaccagactcaccagaaatagcaccagcgattgccaaccaaaatattgcccacgttcggcgatttcacgctgaagttgctgcccacgagagaacaccactgtgcgcgtggcctgcaccatttcggtattggcactggcaaaggcttccagacgcgcggcggcagcagcatcgggaccgctgttgttacactgaagttgagccagattattcaaatcctgacgtaatgcctggtagagtttatcgtccggcagcacgcctgcgtgggcatcgagcatttcgctgtaacgcttgcgctggctttgataaaccttcgcaagcgtagggtcgtccagcacgcagtactgacgatagctgcgctccatctccagtgccgcgttggtcatcgcttcactgcgccgggcatcaataagcgtagtgcggttaaccagcgccgcctgatcgctaagtgcattcaggctttgccaggcttgccatgccagcaccaacaggggcagcagaatcagcaaaaatgccagcattaccagttgtcgtaatgagcggggaaaaacgggccagcgtttcaaggcgttactctcgtcagacgcgaatagcctgatgctaaccgaggggaagttcagatacaacaaagccgggaattacccggctttgttatggaataaggcggtgcctaactcgacgtttcgcccgatggttgatatagctacgctgatatcagaagttggacggcaggcaccttgttgtgcgtcattcgaattttatgtagcacgtcccgaaggggctgacataagtcggtgaatgagccactgcttactattatgcagtaactgtgccaataaagaaaatagtttggtaacgtactgattatacactgctttgaggggtttatggcttctccactatttgaatgtaaatcagccactgtgtcgctaaaaagagacaacttaagataaacttattagataatattaaaatcaatgagttaagtgtcaccaaaaagcgacacggcaaaccacccattgtcgtgatttaaagacacaaaaaagctcccgaagttgggagctcataatagcggttggtgcttaatgccggatgcggcgtgaatgcctcatccgggctgcaataccaatgggttgacgacttaccccaactgcttacgtgcattgcggaaaatgcgcatccatgggccatcctcgccccagttttccggatgccaggagttgctgacagtacggaaaacacgttccgggtgcggcatcataatggtgactcgaccactttcagtcgtgactgccgtaataccattcggagaaccgttcgggttagccgggtaggtttcagtgactttgccgaagttatcgacatagcgcagtgccaccagccctttgctttccagtgccgccagatgcgccgcatcacgcacttccacgcgcccttcaccgtgagagacagcaatcggcatctgcgagcccaccatcccctgcaacagcagcgacgggctttgggttacttctaccagactgaaacgcgcttcaaagcgatcggaggtgttacgcacaaaacgtggccacaactcgctacccgggatcagttcacgcagattagacatcatctggcaaccgttacatacccccagcgccagcgtttgcggacgatggaagaaggttgcaaactcatcgcgtacacggtcattgaacaggatagacttcgcccaaccttcaccagcgcccagcacatcaccgtaggaaaaaccaccgcacgctaccaggacgtggaaaccctccaggcccgtgcgtccagccagcagatcgctcatatgcacgtcgatagcatcgaagcccgcacggtggaaagctgccgccatttcaacatgggagttcacaccctgctcacgcagtacggcaactttcgggcgcgcgccagtggcaataaacggtgctgccacatcttcgttgatatcaaacgacagtttcacattcaggcccggatcggcgtcgtttgatttcgcctggtgttcctgatcggcacactccgggttgtcacgcagacgctgcatctgccaggtagtttctgcccaccagacacgcaacgtggtgcggctttcgctaaatacagtctgcccgttggcggtaatcacaaaacggtcaccggaaaccgcctgcccaacataatggacgcaatcagcaagcccatgctgtgccagtaccgcttcaacggcttcacggtcagcggctcgaacctgaatcaccgcacccagttcttcgctaaacaatgcagccaggcgatcgtcacccagagtggcgatatccgcgtcaatgccacaatgaccagcaaaggccatttccgccagcgttaccagcaggccgccatcagagcggtcgtgatacgccagcagcttacgctgtgcaaccagcgcctgaatcgcgtcatagaagcctttcagttgggcaacatcgcgtacatctgccggtttgtcgccaagctgacgataaacctgcgccagtgccgttgcgcccagcgcgttattgcctttgcccaaatcaatcagcaacagtgcgttatcttcggtagaaagctgcggcgtaatggtgtgacgtacatcttccacgcgggcaaatgcggaaatcaccagcgacaacggcgacgtcatttcgcgctcttcgttaccttcctgccagcgggttttcatcgacatagagtctttacccaccggtatcgtcaggcccagcgccggacaaagttcttcgcccacagctttaacggcttcatacaggcccgcatcttcaccagggtggcctgccgccgccatccagttggcggaaagtttaatgcgtttgatatcgccaatttgtgttgcggcgatgttggttagcgcttcaccgactgccagacgggcagaagcggcgaaatccagcagcgcaactggcgcacgttcgccaattgccatcgcttcgccatagtagctgtcgaggctggcggtagtgactgcgcagttagcgaccggcacctgccacggccccaccatctgatcgcgcgccaccatgccggttacgctgcggtcaccgatggtcaccaggaaagttttctccgccacggtcggcagatgcagcacgcgtttcaccgcgtcagcgatggtgatcccttcacgggccagcgcgtcgcctttcgctttcagcgtttgtacatcgcgggtcatcttcggcgttttgccaagcagtacgtccagcggtagatcaatcggctgattatcaaaatgacgatcgtgcaaagaaagatgcagttcttcggtcgcttcaccaatcaccgcgtatggcgcgcgctcacgcttacacagttcgtcaaacagcggtaactgatcggcagcaaccgccagcacgtagcgttcctgggattcgttacaccagatttccagcgggctcatgcccggttcgtcgctcaggatatcgcgcagttcaaatttaccgccgcgcccgccgtcgctcaccagttccggcatggcgttagaaagaccgcctgcgccaacgtcgtggataaacaggattgggttggcatcaccaagctgccagcaacggtcgatcacttcctggcagcgacgctccatctccgggttgtcgcgctgtacggaagcaaagtcgaggtcggcatcagactgaccagatgccatggaagacgccgcgccgccgccaagaccgatgttcattgccgggccgccgagaacgaccagcttcgcaccaacgttgatctcgcctttttgtacgtgatcggcgcgaatgttgccgatcccacccgccagcatgatcggtttgtgataaccgcgcagctcttcgccattgtggctgttcactttttcttcataagtacggaagtagccgttcagtgccggacgaccaaattcgttgttaaacgccgcaccgcccagcgggccttcggtcatgatgtccagcgcggtaacaatgcgctcaggtttaccgaaatcttcttcccacggctgttcgaagccaggaattcgcaggttggatacggagaaaccaaccagaccagctttcggctttgcgccacgtccggtggcaccttcatcgcggatttcaccgccggaaccggtcgccgcgcccggccacggagaaatcgccgtcgggtggttgtgagtttcaactttcatcagaatatgcgccggttcctgatggaaatcgtagcggcccgtttcgtggtcagcaaagtagcggcccacttcagaaccttccattacggcggcgttatctttataagcagagagaacgtggtctggcgtggtttcgaaggtgtttttgatcatcttgaacagcgatttcggctgctgttcaccgtcgataatccagtcggcgttaaaaattttgtggcggcagtgctcagagttcgcctgagcaaacatatacagctcgatgtcgttcgggttacgacccagctttgtgaacgcatcctgcagatagtcaatttcatcttccgccagtgccaggccaagacgcaggttagcgtcaattagcgcctgacggccctgccccagcaaatctacgctggtgaccggagtcggttgatggtgtgcaaacaactgctctgcatcatctaaagcaaaaaagaccgtttccatcatgcggtcgtgcagttcagcggtaacctgctgccattgttcattggtcagcgtaccggcttctatatagtaagcaacgccgcgctcaaggcggttaacctgttgcagcccgcagttatgggcaatatcggtcgctttcgaagaccagggagagatggtgccaggacgcggggtcaccagcaggagtttgccttgcggggcgtggctggcgagtgccgggccatatttcagcaggcgttcaagttgtgcgtgctcatcatcgtttaacggcgcattgaggtcagcaaaatggacatactcggcgtaaatattgtgaaccgggagcctggcagcctgaaaacgtgccagcagtttgttgattcggaatgccgacaatgcaggcgaaccacgcagaatttccatcataagtctctcgtcttctaagctttcggtgtacccaagggggggaaacgggcgtcattataaagaatctgatgcgctgacgaaaccgtttgcgtggaaataaaatcaccatcgtgaattagcaacgcgtgccgccaatggctgtaataagttgccatctggcgcaggtttacgcaaaatgccgctcatttatgagtaaacctttcactattattacgttttttcaagctgggacgcgcacgacacagagaattaactaattgaaaaaattaaagattaattatctgttcatcggcattctggcactgctgctcgcggtcgctctctggccatccattccctggtttggtaaagccgacaaccgtatcgccgccattcaagcgcggggagagttgcgtgtgagcaccattcatacccccctgacttataacgaaatcaacgggaaaccttttggcctggattacgaactggcgaaacagtttgccgattacctcggcgtaaaactgaaagtgaccgtgcggcagaatatcagccagctgtttgacgacctcgataatggtaacgccgacctgctggcggcaggcctggtctataacagtgagcgggtaaaaaattatcagcctggccctacctattattccgtgtcacaacaactggtttataaagtcggtcagtatcgcccacgtacgctgggcaacctgacggcggagcaactcaccgttgcaccgggtcacgtggtggttaacgatctccagaccctgaaagacacaaaattcccggaattaagctggaaggtagacgacaaaaaaggctctgtggaattaatggaagatgtcatcgaaggaaaactcgattacaccattgctgattctgtcgccatcagcctgtttcagcgcgttcacccggaactcgccgtagcgctcgatatcaccgatgaacaaccggtgacctggtttagcccgttagatggcgataataccctttccgccgccctgctcgacttcttcaacgaaatgaatgaagacggtacactggcacgcattgaagagaaatacctggggcatggcgatgattttgattacgtcgatacgcgcacatttttacgcgccgtcgatgcggtactgccgcagttaaagcccctgtttgagaaatacgccgaagaaattgactggcgtttgctggccgctattgcttatcaggaatcgcactgggatgctcaggccacttcaccgacgggtgtgcgcggcatgatgatgttaaccaaaaacaccgcgcaaagcctcggcattacggatcgtaccgatgccgaacagagcatcagcggcggcgtgcgttatttgcaggatatgatgagtaaagtgccggaaagtgtgccggagaacgaacggatttggtttgccctcgccgcgtacaatatgggctatgcgcatatgctggatgcccgcgccctgacgacaaaaaccaaaggtaatcctgacagttgggctgacgtaaaacagcgtctgcctttacttagccagaaaccctattacagcaagctgacttacggctacgctcgtgggcatgaagcctacgcttatgtcgaaaatattcgtaaatatcagattagcctggtgggttatctgcaggagaaagagaagcaggctacagaagcggcgatgcaactggcgcaggattatccggcggtatcacctacggagttgggcaaagagaaatttccttttctctcgtttctttcccagtcgtcatcaaactatttgacccactctccctctctgctgttttccagaaaagggagtgaagagaaacaaaattaatctgtcgaggattgcgcttttttctgcgctttaatttcctggcggcgcatgcgaaagaagtcactgagcaacgccgcacactcatccgccagtattccttccgtaatttccacccggtgattcatacccggatgatgcagcacatccattaaagatcccgcagcgccagttttcgcgtcacgcgcaccaaagaccacgcgaccaatgcgactgtggatcattgctccggcacacattacacagggttcaagcgtgacatacaacgtggcgtcgatcagacgataattttgcatcaccagaccgccctgccgtagggccatgatttctgcatgtgcggtgggatcatgtcgaccaatcggacggttccagccttcgccaataacacgattgttatgcactaataccgcgccgaccggtacttcccgctcatcccaggcacgcttcgccagcgtcattgcatgacgcatccagtattcgtggctaaattcgacttcagacaaaaagaaaactccgattataaaagcgcggcgcattatacacggccgctatgctttactctattccagttgctggagttcaccgcgcggggttactcgccaacgatgctgacagaaataaagcagcgggttgtcctgattactgtcgctatagccactgtacagccgcagcggcgtgccgattttgcgctccagttgcgcgaccttttcatgtcccagacaacgcatcgtcaatacccaaccaccatagccacgctgaatctgactggcgataagattaacccgcggcagccagggcgtatcgaaataaaccgcttcaaccagcgactgcggagagccggtaatcaaccagatatcagcatcggaacttaacaggtaggtggttaatcgctcctgaaccagcggaaaggcggtaacattgtcacgaaaccaacgtacgaaatcggcctgcaacgcctgcaaacgcgcttcattgtgaccaaaagtgcatccccacagaagcagactcatcggccagcgtgccgcacgaccttttatcaataacgcaatggctatgatcggcaacaacggcagaacaagtaacgcattcagcggttggcgacgcagtaaataacgcaaaaaactgccgaacatatcctgctgatgcaatgttccatctaagtcaaaaaacaccacacgacgctcgtgagttgccaaaccatactcctctggactgaaacatcctgattaattttcgctactacatagcctaacagatagatcatcacttttccggcaacaatcgaccgcatcatggctaactggaatttttaattcatggcaattagcggcaatggaatataaaattcactcgcgtttgtctcatattgcctgttgtcgccactatttcatcgcgaggaaagatatgaacggcttacttcgtatccgtcagcgttaccaggggcttgcccagagtgataaaaaactggcggattatctgctgctacaacctgatacggcgcgccatttaagctctcagcaactggccaacgaagccggagtcagtcagtccagcgtcgtgaagttcgcgcaaaaactcggctataaaggttttccggcactaaagttggcgttgagtgaagcgctggcaagccagccggaatctccctccgtgcccattcataaccaaatccgcggtgatgatccgttacggctggtcggcgaaaaactgattaaagaaaatactgccgctatgtacgcaacgttaaacgttaatagtgaagagaaactgcatgaatgcgtggcaatgttgcgctctgcgcggcggataattctgaccggtattggcgcttcgggtctggtggcgcaaaactttgcctggaagctgatgaagattggcttcaatgctgccgcagtgcgcgatatgcatgcgctactcgctacagtacaggcgtcgtcccctgacgatctgttattagccatttcctacaccggtgtacgacgcgagttaaacctggcggcagatgagatgctgcgagtgggcggaaaagtgctggctattaccggctttactcccaatgccctgcaacagcgtgcttctcattgcctgtataccattgccgaagaacaagcgacaaacagtgcttcaatctctgcttgtcacgcgcagggaatgttaacggatttgctgttcattgcgctgattcagcaggatctggaactggcaccagaacgtattcgtcatagcgaagcgctggtgaaaaaactggtctgagtaaagaatgcgcgtataatgcccgcccggtttgtgttgttttgagagtttccttatggcgctgttaatcactaaaaaatgcatcaattgtgatatgtgtgaacccgaatgcccgaatgaggcgatttcgatgggtgaacatatctacgagattaacagcgataagtgtaccgaatgcgtagggcactacgagacaccaacctgccagaaggtgtgtccgatccccaatactattgtgaaagatccgcaacatgtcgagacggaagaacagttgtgggataaatttgtgctgatgcaccacgcggataaaatttaatattctgctctggaagtagagtgttaattattttataggaaaatcttaacgctattatatttatttaaatgatgacattagcataatcattcactaagttaatttatatagtatctgcccagacacttatttatagttattaaaggcgcgtccgactggttcaccggacgcaccttaagtacgtttccttgtgttataagaacaaaaggagcagctgtaaaacagcaatgatgattttgatgacccgtttaatcaggtatcggcaatcagtcattcgtttttccttaaacaaggaatgcagccgttcagattagcccttacatctccccaaaactgaacgtgcgagttattggaatcgagtgctgcactccacaccagagctttgacgacaccactcgtttcaatgggggaattcagtggcatggtgtaaagcacagcaaaattgccaataacgaaaccgattttaatgtacttatcaaaaagcggtcacgttaatcttttcatcaatgtcgatttcttcgtaaaggctcgcgttttttatgtcagagattgcaagttgcttgtacaggtcaacgaaattgatccataatcattttcgttggaatcgtgtgctgcacaaaattaaagttaaaaagtaaaacccccgttccttaccagttcgggggttttactttataaagagaacggtattattttaactttcaataattaccgtggcacaagcatagtggcgctcatcggcaagcgttacatgcatatttacaacgccgagcttttccgccagttttaatgcctcaccccatagccgtagccgtggtttgccgagctcatcattgaatacttcaaactgattaaacgccagaccattgcggatccctgtgccaaatgcttttgccgccgcttctttcacagcaaaacgcttcgccagaaaacgcactggctggtggtgcgttttccagatttcccattcgttatcgcttaatacgcggcgtgccaggcgctcaccggatcgggcgatcaccgcttctatgcgagcgatctctacaatatccgtacctaaacctaatattgccattagccacgcgcttccagcatcagacgtttcatttctgccaccgcatctttcagtccggtcatcactgcacgaccaataatggcatgaccgatattcagttcatgcatctcagggatggcggcaatggctttcacgttgtgataggtcagaccgtgtccggcgttaactttcagaccgagactagtggcaaaggtcgcggctttggcgatacgcgccaactcttgcgcctgttcggcgtcagttttggcatcagcatagcaaccggtgtggatctcgataaacggtgcgccaacctctgccgcagctttgatctgatcttcatcggcgtcgataaacagagaaacctggatcccggcatctgccagacgtttgcaggcatcgcgcattttttcacgctgccctgcgacgtccaggccgccttcggttgttacttcctgacgcttttccggtaccagacagcaaaaatgtggcttcgtctcaacggcgatcgccagcatctcttcggtcaccgccatctccagattcatgcgggtatccagcgtctggcgcaggatgcacacatcgcggtcggtaatgtggcggcggtcttcacgtaaatgcacggtaatgccgtccgctcccgcctgctcagcaataaacgccgcctgcaccggatccgggtaagcagtaccgcgcgcgttacgcagcgttgcaatatggtcaatgttgacgcctaacagtaattcagccatgacaatcctcatcattcataatgtgttttcaccgttcgcttaggcataaactgccggaacagttccctgctctttaatggtttaccgccaagatacggcttaagcgccatgcgggtaaagcgtttcgcggcgcgcagtgtgtctgcgtcaggaaattcccgcgcgtttaacgcttttaactgccttccagtgaacgttttattgtcgataacgacgcttgcgataaaccctttttcttcgcgataacgatacgtcatggtgtcatctaccggctcgccgctacccgcacaatgggtaaaattgacgccatagcccagatgcccgagcagtgccagttcaaagcggcgcaacgcgggttctggcgtaccagtgaccccggcaagagactgaatgcagtgcaagtaatcgaaaaagagttcagagaagcgcgtctcgtattccagtacgcgggagagaagttcgttgatgtacagaccgctgtaaagcgtgataccgcttaatggcagcgccagcgagacagcttcagcactgcgcagcgttttgacttcgccacgcccgccaaaacgtagcaagagaggggtgaaaggctgtaatgcccctttcagagtagagcgtttagagcgtgcgcctttggcaaccagacgcacgcgacccgattcctccgtgaagacgtccagcatcaggctggtttcgctccacgggcgactatgcaggacaaatgcgcgctgccagccttccatcggagttactcttaaagatcgtcaacataaccgagactgcgcagtgcgcgttcgtcgtcggcccaaccggatttcacttttacccacagctcaaggtgaacaggcgcttcgaacatttcctgcatgtctttacgcgcttcaatcccgatggttttgatcttggcccctttgttgccaatgaccatcttcttctgcccttcacgctcaacgagaatcaaaccgttgatgtcataaccgccgcgttcgttagagacgaaacgttcgatctccacggtcacggagtacggcagttcagcgccgagaaaacgcatcagtttttcgcggataatttcagacgccataaaacgctgtgagcgatcggtgatgtaatcttccgggaagtgatgggtcgcttcaggcagatgcttacgcacgattgccgcgatagtgtcgacattcagcccggtttcggcagagatcggcacgatatcgaggaagttcatctggcttgccaggaactgtaagtgtggcagcagatcggctttttcctgcacgttgtccactttgttcaccgcgaggattaccggcgctttgccatcacgcagcttgttgagcaccatttcatcgtccggcgtccagcgggtgccttctacgacaaaaatcaccagctcaacgtcgccgatagagctgctcgccgctttgttcatcaggcggttaatggcgcgtttttcttccatatgcaggccaggggtatcaacgtagatcgcctgatacgcgccttcagtatggatccccacaatgcggtgacgagttgtttgcgccttgcgggaggtgatggagatcttctgccccagcagtttgttcaacaatgtggatttgccaacgttcggacgtccgacgatagcaataaatccgcagtaacttttatcgatgctcattccagctccagttttttcaacgcctgttcggcggcagcctgctcagccttacgacggcttgaacctgtgccaaccaccggttcactcaggccgctgacctggcagtggatagtaaattcctgatcgtgcgcttcgccacgtacctggactaccagataagttggcagcggcagatggcgaccctgcaaatattcctgcagacgcgttttcggatctttttgtttatcgcctgggctaatttcgtccagacgagtttgataccagttgaggattaatttctcgacggtttgaatatcactgtcgaggaatacgccaccaattaatgcctcgacggtgtcggcgagaattgactcacgacgaaatccaccgcttttaagttcacctggccctaaacgtaagcactcacctaactcaaattcgcgcgccagttcagccagcgtattaccacggaccagcgtggcgcgcatccggctcatatcgccttcatccacacgagggaaacggtgataaagcgcattggcgataacgtagctcagaatagagtcacctaaaaattctaaacgctcgttatgtttactgctggcactacgatgagttaatgcctgctgcaacagttcctgatgattaaaagtgtagcccagcttccgttgaagccgattaattacgatggggttcatgcgataccaataaataaatgcgtcaacaattcagcacacgaaacagacctgatatacatggctcggctaactgcttcactgcagtttcagtttaccggtatatggggaccaacgctgtttcgtgtgccgtggcaacctggaggtgccaaccttaaacttcgggggaatattctatacacaacgacgggggatgtcgttagccacgggagatttatctcataaataattcacgttgtcgccataacggcgacaacgtgaacgaagatggctattaatggataccgccaatgcgacttaagcgcacaccagtcggccattcgccttcttgcttatcgaagctcatccagatagccgttgcccgaccgaccagattcgcttcaggcacaaaaccccagtaacggctgtccgcgctgttgtcgcggttgtcgcccatcatgaagtattgtcccggcggaacaatccaggttgccagttgttgccctggctgctggtaatacatccccacctggtcctgcgcaatcggcactgtcagaatgcggtgcgtcacatcacccaatgtctctttacgctcggaaagacgaattccattttctttggtttcgtttttcggcacttcaaagaatccgctggtcgcttccccaccattacggcgtgagaaggtctgaacgaaatcgctcggttccacgttggagtaagtgaccggtagcgcgttttcacacgcctggccggaactgcatcccggttgaatcgtcagctcttttgagaccggatcataagtgactttatcgcccggcaaacccaccgcgcgcttgatgtaatcaagctttggatcttccggatatttaaagaccacgatatcgccgcgtttcggatgaccggtttcgatcagcgttttctggtagataggatctttaatgccataagcaaacttctctaccagaataaaatcaccgattaacagagtcggcatcatcgaacctgacgggatctggaacggttcataaataaacgaacgcacaatcaatacgatagccagtaccggaaaaacagaagcaccggtttccagccagccaggcttcggcgcaacctttttcagcgttgctttatccagtgagtcaccggcagccgcctgcgccgctgcctgacgttcccgccgtttaggtgcgaaaaagaatttatccacgcaccataaaatgcccgtcaccagtgtggcaatcaccagaatcagggcaaacatattcgccatgccaactcctaagggttatttgttgtctttgccgacgtgcagaatggcgaggaacgcttcctgcggcagctcgacgttaccgatctgcttcatgcgtttcttaccttctttctgcttctgcagcagctttttcttacggctgatatcgccgccataacatttagccagtacgtttttacgcagctgtttcacggtggatcgcgcaatgatgtgcgtaccaatcgctgcctgaatagcgatatcaaactgctggcgtgggattagatctttcatcttctccaccagctcgcgaccgcggttttgcgaattatcacggtgggtgatcaacgccagcgcatcaacacgttcaccgttgattaatacgtctacacgtaccatgtcggacgcctggaagcgtttgaagttgtaatccagagacgcataaccacgcgaggtagatttcaggcgatcgaagaaatcgagcaccacttccgccatcgggatctcgtacgtcagcgccacctgattaccgtggtaaaccatattggtctgcacgccgcgtttttctacgcacagcgtaataacgttgccgagatatgcctgcggcagcagcatgtgacattctgcaatcggctcgcgcagttcgtagatgttatttaccgctggcagcttggatgggctgtcgacgtagataacttctcttgacgtggtttcaacttcatacactacggtcggcgcagtggtgatcagatccagatcgtattcacgttccagacgttcctggatgatctccatgtgcagcagaccgaggaagccgcagcggaaaccaaagcccagcgcgcttgagctttccggctcatagaacagtgaggcatcgttcaggctgagtttacccagcgcgtcacggaaggcttcatagtcgtcggaacttaccgggaacagaccggcgtatacctgcggtttgactttcttaaagccaggcagcgccttttctgccggattacgcgccagcgttaaggtatcgcctactggagcgccgtggatatctttaatcgcacataccagccagcctacttcgccacatttcagttcagtgcggtcaacctgttttggcgtaaaaatacccagacggtcggcgttataggtctgcccggtactcatgactttcactttgtcgcccttacgcagggtgccgtttttaatacggataagtgaaacaacgcccaggtagttgtcgaaccaggagtcgataatgagtgcctgtaacgggccttccggatcgccttccggcggcggaatgtcgcgcaccagacgttcgagaacgtcctgcacgccaacgccggttttcgctgaacagcgcaccgcgtcagtggcgtcgatgccgacgatatcttcaatttcttccgccacgcgttcaggatcagctgccggcaggtcaatcttgttcagtaccggcaccacttcgagatccatttccatggcggtgtagcagtttgccagggtttgcgcttctacgccctgcccggcgtcgaccaccagcaatgcaccttcacatgcagccagcgaacgagaaacttcataggagaagtctacgtggcccggggtgtcgataaagttaagctgataggtttcgccgtcagacgctttgtagtccagcgtcacgctttgcgctttgatggtaatgccacgctcacgctcaagatccatggaatcgagaacctgcgcctccatttcacggtcagacaggccaccgcagatctggataatacggtcagacagcgtcgatttaccgtggtcaatgtgagctatgatcgaaaagttacgtatattcttcataaagtatgattattgtgccttaatgcccggttaaccaggcttttagaagtcgctgttctgagcttaacgtctgtattaatagaaacgccgcattctacactacaacattgaggcgaggaaatgttcataccgtatggattgtggtatctggaaacgtcctcgcatttgttatgcaaaatgcaacaaagccagtgaaatcactggctcgcgtcttccgaagatgtttcaaatcgcacaaggccaggcggcaaggccacgcttaagatgatcggttgccattctgcccgggcagcaaacttacgcgagtagccgcgcgcaatcaggaacccgccaaaaccgccgaggatcgcaccacataatgctgcgacgtcagaagcaaagagtagctgaaatagcgaagcgatgaggaataatcccaccagcggcgacatataaaccagtaatgcggagctaagcaggctgccttcggcgattcctaattctactttttgccccggcactaacggctcatcacagggtacgacaatggtatgcgtggtttgcgggccaagtttattcaacacgcggctaccgcaaccggcgcgtgaagcgcagctgctgcatgaggctttaacatcacaactgaccagcgcctgcccgttttgccaggagacgacggtagcccactctttgatcattgcgctgccccgaacttaatattctcggcaatgcgtttcgccgtttgcggcggcagttcaccgacaatggtgatttcggcgttatcacgtacgcttgtactgacggttctgcgtccggtgcgcaacatctgatcgctgctcgatggcgtagcgcggttaacgtttaccgagaagctgaataatccgtcggaatagagacgtgattcgataggcatgttgtccatcgtcggtagcggacgtcgactactggaaacttcgctaaaaccctgtggcaaccaggttggcgtccagctgaatttagctttttcacctacaggaacagaaagcaacggcggcaaatttgccttcgccagcgtctgcatactgctgctgatatcctgattgacgttaaaagcaatcacgcgaaattgttccagcgtttcaccatcgcgatcaaggagatcaacccgcatcggtaatttcgattcggtgtccatccacacaatgtagctgtagcgtgtgccatcacgggcgactacgcgaatgacttcgcaaagacgatcagcaatacgcgtgcgtcccacggagataaagtcgtagtaaggagaaaggcgtttgaaatcggtataaatgagcgatggcagagaatcaacaatgtaatcgccattaagcgtgaacggttcaaggcccggctcaaagtagctgatttcattgccgcgctgtaccacttcccggcgcgggccatccatttgcaacagctgtgcaagcggacggttatcgaggcgtgcatgtcgataacgcagagactcaacaccctgtttattgatgctgatgaatgacagctcgtaattcagtgactgactggccaggttcatctgctgtaataacgccccggacgcgggagtggccgaggcgttagcagagaataacaggctacctgtcactaatgacatggcaaaccaaagttgcttcattactgcgattgcgttcctaaagtttgaattcctggcacctgtacagcggcttgctgagtttgtgcctgctcaaactgaagctgttcagagtggagtcggcgttgcagttcgtaatcctgcaacattgcattaatgcgacgacgctgctcctgtacctgctgctgttgaccattatttgcggtcgcttcagaaggtactcccagactaaccgggctggctttacccatcatcggcagtgtattaaatactggcgtttcgggctgctgggacgtttcagattgcccattatagtgctggacgccaacgataactgcaagcgatacgcatgctgctacgcccatttgggtaagctgtgccgcccacggacgtactttctgccagaatggcattttctgccattgatgcggcgcaggctgggcttccgggatcaatgtcgccggttgacgtactggctcttcttcaatggcggccatcacacgtgaagagatatcgaaatggagcacctcgggagtatcaccccgcattgagtcacggatcaagtgatagctttcccaggttttctgcatttctgggttatgagccagttcgttaagcagctcactatccagcgtttcgccatccattaaagcggaaagttgttctttctgcatgcctaatacccttatccagtatcccgctatcgtcaacgcctgataagcggttgaactttgttatcaatagcttccctcgctcggaagatacgtgaacgcaccgtacctaccggacaatccatgatagcggctatctcttcatagctcaggccatccagctcccgcaaggttattgccatgcgtaaatcttccgggagggactcaatagttcggaaaactatctgtctcagttcttctgacaacattaagttctcagggttcgaaatttctttcaacgcgccgccactttcgaagttttcagcttcaatggcatccacatcactggaaggtggacgacgcccctgagcaaccaggtaatttttcgctgtatttacagcaatccgatacagccatgtataaaaagcgctatctccccggaacgaatccagcgcacgataggctttaataaaagcttcttgtaccacatcgggaacatcacccgacggcacatagcgggaaaccagactcgccactttatgctgatagcgcactaccagtaagttaaaggctttctgatctcccttctggacccgttcaaccaggacctggtccgttaactgctcgctcatccgaggtaaagtctccccaaaccaaatttccacgcgctatcgaaacgccactccattagctgcaatttgagcaagcaaagggttagagtgtctcgtttttgtaaagttccgtaacgcatctgtttttgtttgtcatgctgtagacggatcattatctatcattataagtctacagaatctgaacatcgcattatctgtgtagaaatgcccatttaactgcctgaagagtaacccaacggcctttttatttcaccacctaatcctccaccagccagtaacttctcgttttctcgccgccctgaggcagcgtgtttagtcactgtaacaaatattaaaatagcaggtgtttattcgcacaacatgatgttatgctgaccaaaccgtgtttagtaaattaaacaaagaaaatgaatactctccctgaacattcatgtgacgtgttgattatcggtagcggcgcagccggactttcactggcgctgcgcctggctgaccagcatcaggtcatcgttctaagtaaaggcccggtaacggaaggttcaacattttatgcccagggcggtattgccgccgtgtttgatgaaactgacagcattgactcgcatgtggaagacacattgattgccggggctggtatttgcgatcgccatgcagttgaatttgtcgccagtaatgcacgatcctgtgtgcaatggctaatcgaccagggggtgttgtttgatacccacattcagccgaatggcgaagaaagctaccatctgactcgtgaaggtggacatagtcaccgtcgtattcttcatgccgccgacgccaccggtagagaagtagaaaccacgctggtgggcaaggcgcagaaccatccgaatattcgcgtgctggagcgcagcaacgcggttgatctgattgtttctgacaaaattggcctgccgggcacgcgacgggttgttggcgcgtgggtatggaaccgaaataaagaaacggttgaaacctgccacgcaaaagcagtggtactggcaaccggcggtgcttcaaaagtttatcagtacaccaccaatccggatatttcttctggcgatggcattgctatggcgtggcgcgcaggctgccggattgccaatctcgaatttaatcagttccaccctaccgcgctgtatcacccacaggcacgcaatttcctgttaacggaagcactgcgcggcgaaggcgcttatctcaagcgcccggatggcacgcgttttatgcccgattttgatgagcgcggcgaactggccccgcgcgatattgtcgcccgcgccattgaccatgaaatgaaacgcctcggcgcagattgtatgttccttgatattagccataagcccgccgattttattcgccagcatttcccgatgatttatgaaaaattgctcgggctggggatagatctcacgaaaaaacccgtgccgattgtgcctgctgcacattatacctgcggtggtgtaatggttgatgatcatgggcgtacggacgtcgagggtttgtatgccattggcgaagtgagttataccggcttacacggcgctaaccgcatggcctcgaattcattgctggagtgtctggtctatggctggtcggcggcagaagatatcagcagacgtataccttatgcccacggcgtcagtacgttaccgccgtgggatgaaagccgcgttgagaaccctgacgaacgggtagtaattcagcataactggcacgagctacgtctgtttatgtgggattacgttggcattgtgcgcacaacgaagcgcctggaacgcgccctgcggcggataaccatgctccaacaagaaatagacgaatattacgcccatttccgcgtctcaaataatttgctggagctgcgtaatctggtacaggttgccgagttgattgttcgctgtgcgatgatgcgcaaggagagccgtggcctgcatttcacgctggattatccggaactgctcacgcattccggtccatcgatcctttctgccggcaatcattacataaacagataaaaagcctgggtcagcgccgtatacgcttcggaatagttctggtctggcccacgaatgactaagcgatcgctaaagcattctcccgcctgcggggagaatgccagcagcacccgatgcggcagtcgcgcttcgttttccgccacatccgtccgcaaacgtaaatgccagcccatacttaatgccagttcagtaaaaccattaccaatctgctctggcagcaccacgcagaaaaatccctcttcggtaatgcactccgccgcacaagtcagcaacgatgggtgatcaagcgtagtggtatagcgagcctgttcccgttgaggtgtcgcgcactctactccctgctgatagtaaggtgggttgctgatgattaaatcgaagcgtactgtctgctgtgtgatccactgcagaatatccgccgtatggacgttaatccgctctgcccacggggactggttgatattttcctgcgcttgcgcggcagcttcactttccagttcaactgcatcaatcatcacgctgtcatctgttcgctgcgccagcattaatgccaacaacccgctacccgcgccgatatcaaggcaacgttttaccccagccacaggtgcccatgcgcccagcaaaatgccatccgttcccactttcatcgcacagcgatcgtgagcaacaaaaaactgtttaaaagtaaatccattacgacgaaacacggatgtagactgtgacatgaaaataaaaccttgcaggaaaaacggcgatagcaccgggtgagaacaatacccgagaagcgatatccatacaaacagatgaagattgcagccgtaacgtctataatcagcgccccacacagaggtagaacatgactgtaacgactttttccgaacttgaactcgacgaaagcctgctggaagccctccaggataaaggtttcactcgcccgaccgccattcaggctgccgccattccgcctgcgctcgatggccgtgatgtactcggttctgcgccgacaggcaccggtaaaacggcggcgtatctgctgccagcgttgcagcacctgctcgatttcccacgtaagaaatccggtccgccgcgtattttgatcctcaccccgactcgcgaactggcgatgcaggtggccgatcatgcccgcgaactggcgaaacatacgcatctggatattgccaccatcaccggcggcgtggcctatatgaaccacgcagaagtgttcagcgaaaaccaggacattgtggtcgccacgaccggacgtctgctgcaatacataaaagaagagaacttcgattgccgcgcggttgaaacgctgatcctcgacgaagcagaccgtatgctggatatgggcttcgcccaggatatcgaacatattgctggcgaaacgcgctggcgtaaacagaccctgctcttttcggcaacgctggaaggcgatgcgattcaggactttgccgagcgtctgttggaagatccggtggaagtttctgccaatccgtctacccgtgagcgcaaaaaaattcatcagtggtattaccgcgccgatgatcttgagcataaaaccgcgttgctggtgcatctgttaaaacagccggaagcgacccgctcaattgtgtttgtgcgtaagcgtgagcgtgtgcatgagctggcaaactggctgcgcgaagcaggcatcaacaactgctatctcgaaggtgagatggtacaaggcaagcgtaacgaagcgattaaacgcttgaccgaaggccgcgtaaacgtactggttgctaccgatgttgccgcgcgcggtatcgacattcctgacgtcagccacgtctttaacttcgatatgccgcgcagtggcgatacttatttgcaccgtatcggacgtaccgcgcgcgccggtcgtaaaggcaccgcgatttcgctggtggaagcccatgaccatctgctgctgggcaaagttggtcgctatattgaagaaccaattaaagctcgcgtaattgacgagttacgcccgaaaacgcgtgcgccaagcgagaagcagaccggcaagccatcgaagaaagtactggcaaaacgcgccgagaagaaaaaagctaaagagaaagagaagccgcgggtgaaaaaacgccatcgcgacaccaaaaatattggtaagcgccgtaaaccaagcggaacgggcgtgccaccgcaaacgacagaagagtaatctcaatgccgggtttaagcccggcattgtttttatcccggcaaaaaacactcttcaacacactgaataaaagtgtgcatcgccgggctaaccgcttttccggcatggtgagcgcacattgccgtaatggtctgcgactgttcgccaaaaggcaattcaattaattctccgcactccaactcttttaccaccgcaaaacgcggcaggtaactgactccgatatttgccgcgacacaacgcttgatgctttcgatacttataagctcaatggtgttttccaccgtgatccgccgctggcgcagcgtgctctcaaatatctgccggaagacacattgtggttcgttgataataaagctacaggcgttatgtcttcccggctcagtaaaatcgacatctgcaatttgcggtgaagccaccagcgccagcggttgttcacccaactctcgtcggttcagagcatcatcattccctacgcgataaaaaaccccgacatcggcctcatcattcagtagcgcatcacggatcacgtaacagttcagcgactgcaacgataaacgcacttttggagcgcgttgccgaaaacgctgcaacacctgcggcattcgataagagagcaacgtttcgcctgaaataacgcgtagttccccgtccggatccgactcttttttcgcagcctcacgaagcgtatccatcactcgggtaagttcatagatgtgcggcagcagcttttttccttcgcgggtaaggcacattcgtcgaccaattttctcaaacaattgtaccgagaactcctgctcaagctgctgaatatgaaaagtcaccgtcgattgtgtgcagcacaatttttgcgaagctcgcaaaaaggaaccctcttccaccacggttttaagtgtaataaaacggcgcagatccataaccccaaacctatcgaaaatatcgaatttagaatgtaaaaacattcatttttttaaatgttccgtgtcgggtactgtctaccaaaacagaggagataacaagtgacaccgacccttttaagtgctttttggacttacaccctgattaccgccatgacgccaggaccgaacaatattctcgcccttagctctgctacgtcgcatggatttcgtcaaagtacccgtgtgctggcagggatgagtctgggatttttgattgtgatgttactgtgtgcgggcatttcattttcactggcagtgattgacccggcagcggtacaccttttgagttgggcgggggcggcatatattgtctggctggcgtggaaaatcgccaccagcccaacaaaggaagacggacttcagacaaaaccaatcagtttttgggccagctttgctttgcagtttgtgaacgtcaaaatcattttgtacggtgttacggcactgtcgacgtttgttctgccgcaaacacaggcgctaagctgggtagttggcgtcagcgttttgctggcgatgattgggacgtttggcaatgtgtgctgggcgctggcggggcatctgtttcagcgattgtttcgccagtatggtcgccagttaaatatcgtgcttgccctgttgctggtctattgcgcggtacgcattttctattaacgaaaaaaagcggaagaggtcgccctcttccgcttagtaacttgctacttaagccttacaggctttcagtaaaggtacgagcgataacgtcgcgctgctgttccggagtcagagagttaaagcgaactgcataaccggatacacggatggtcagctgcggatatttttccggatgcttaactgcatcttccagcgtttcacgacgcagaacgttaacattcaggtgttgaccaccttcaacgcgaacttctggtttcacttctactggaacttcacggtattcaatgtcacccagtttgcttactgcaaccacttcgtcttctgcaaaacctgctttcgcaacgatgcaacgcgcttcgcctttttcgctgtccagcaaccagaaagagttcagcagatcgtcgttagcggctttagtaatctggatacctgtaatcatgtgatgcctccccggcaaaattatttgatttgttcagcctgtcgcggccaattggtaaaaccattgttgcttgagtgtatatatactcctcaaacacccttgattctttgatttaaatcaataaaaaccatatatcaagtgtggtcacaaatggattttattgttttacatcaacttatgcagatgtgaaattttaccaatttacatttttttgcatgtctttttgtctataaaatgagcatgattttgttctgtagaaagaagcagttaagctaggcggattaaagattcgcaggagagcgagatggctaacgaattaacctggcatgatgtgctggctgaagagaagcagcaaccctattttcttaatacccttcagaccgtcgccagcgagcggcagtccggcgtcactatctatccaccacaaaaagatgtctttaacgcgttccgctttacggagttgggtgacgttaaagtggtgattctcggtcaggatccttatcacggaccaggacaggcgcatggtctggcattttccgttcgccccggcattgcgacaccaccgtcactgctgaatatgtataaagagctggaaaatactattcccggtttcacccgccctaatcatggttaccttgaaagctgggcgcgtcagggtgttctgctgctcaatactgtcttgacggttcgcgctggtcaggcgcattcccacgccagcctcggctgggagacgtttactgataaagtcatcagcctcataaatcagcatcgcgaaggcgtggtgtttttgttgtggggatcacatgcgcaaaagaaaggggcgattatagataagcaacgccatcatgtactgaaagcaccgcatccgtcgccgctttcggcgcatcgtggattctttggctgcaaccattttgtgctggcaaatcagtggctggaacaacgtggcgagacgccgattgactggatgccagtattaccggcagagagtgagtaaattttgcgggaaaatgccggatggcagagttgccatccggctgatttatcaggctttattctgacgccaccattcgccaagaagaacgccggttgcgacagagatattcagcccggcaacgttgccagtaccatcaatcttcacgcgcagatcgttcggatcgcgtgcggcatccggtaacccttcatattcctgacccagcaccagtaccattttcgctggcagactggttttgaacagcggtttaccctgctcgctggaagttgtcactacggtgtaacccgcctgacggaaatcatccagcacgttaacaatgttgtcgccagtaatcggctgaacgtgctctgcgccgccttctgcggtacggatagccgccccagactccagcagtgctgcatcctgcaccacaacacctttcacgccgaagtgcgcacagctacgcatcatgccgcccaggttatgcgggttagattcgttttccagggccagtacacaatcctgcgcgcctgcctggcttacccactgctgcacggttgtaccgttacgctttttgatcaggaagcaaacgccgccgtgatgttccgtgcctgacgcttttgtcagttccgcttcatccaccacatggtacgctttgcggtttgccgccatccagcgcaaggctcctttaaaacgtggcgttacgctctggataaaccaggcgcgaacaatcgcttccggacggctctggaacagtgcctgacaggcgttttcgccgtagacgcgggtttcttccgcacgctgacgacgcaaaacttccggatcaataaaacttttaccactgatgccaccgtgatcggccttttccggcgtctcatcacccggcgcgcgggaaaccgtgcgccacggcgaatcttcccacttgcggtcacggtgctgactctgtttgtcatcgcgggcggggcgacggccaccgtcagtacgagattttcctggacgcccgccccctttcccggtacgcgggttgtgggtacgtttatcagaatcatcatcactgcggacatacatcactttgaccttgccgcttttacctttcatttcatcgttcatgcttttctccaccagcgctgcgcgaagcgcgcagattacccgaagtccgcgcggttcgccatgatttcgttccaaagcctgtgtctatcatacccattgaataaaacagattgttgtctggaacaatgtccccgataatatgtaacatattagaaacataccggcgtcgttgccgataagtctccttactcatcccgaggttagttatgaataccgtttgtacccattgtcaggccatcaatcgcattcccgacgatcggatcgaagatgcggcaaaatgcggacgctgcggtcacgacttgtttgacggagaggtgattaatgcgaccggtgaaacgctcgacaaattgctgaaagatgatctacctgtggtgatcgacttctgggcaccgtggtgcggcccctgccgtaatttcgcaccaatttttgaagatgtcgcgcaagagcgtagcggtaaagtgcgctttgtgaaagtgaataccgaagctgaacgtgaattgagcagccgctttggtattcgcagtattccgacgatcatgattttcaaaaatggtcaggttgtcgacatgcttaatggcgcagtgccgaaagcgccgttcgatagctggctgaatgaatctctttaatcttaccggggcgcatcttgtgccccgttttctcctctgcgacaatggcgttttttcgacgctcccttatgaccgaaaacgctgttctccagttacgcgccgagcgtattgcgcgtgcaacacgtccttttcttgcccgcggtaatcgcgttcgtcgctgccaacgctgtcttttgccagagaaattatgtctctgttcgacaattaccccagcacaagcaaaaagtcgcttctgtttgctgatgttcgacaccgagccaatgaagcccagtaataccgggcgtctgattgctgatattttgcctgataccgttgcgtttcaatggtcgcgtaccgaaccctcgcaagatttgctggatctggtgcaaaacccggactatcagccaatggtggtctttcccgcttcgtatgctgatgagcaacgggaagtgatcttcacaccacctgccggtaagcctccgctatttatcatgctcgatggtacctggccagaagctcgcaagatgtttcgtaaaagtccgtatctggataatcttcccgtcatttccgtcgatctttctcggctttctgcctatcgcctgcgtgaagcccaggctgaaggccaatattgtactgccgaggtagccatcgcactgttagatatggccggcgataccagggcggcgacagggttaggcgagcattttacccgctttaaaacacgctatctggcaggaaaaacgcaacatccgggaagcatcacagcagaacagttagaaagcgtttaaaatcattcggtcacttctgcgggagaccggtatgagtcagcgaggactggaagcactactgcgaccaaaatcgattgcggtaattggcgcatcgatgaaacccaatcgcgcaggttacctgatgatgcgtaacctgctggcgggaggctttaacggaccggtactcccggtgacgccagcctggaaagcggtgttgggtgtgttggcctggccgggtattgcccgcttgccctttacacccgaccttgcggttttatgtaccaatgccagccgtaatcttgctcttctggaagagctcggcgagaaaggctgtaaaacctgcattattctttccgccccggcatcgcaacacgaagatctccgcgcctgcgccctgcgccataacatgcgcctgctaggaccaaacagtctgggcttactggctccctggcaaggtctgaatgccagcttttcacctgtgccgattaaacgcggcaagctggcgtttatttcgcaatcggctgctgtctccaacaccatcctcgactgggcgcaacagcgtgagatgggcttttcctactttattgcgctcggcgacagcctggatatcgacgttgatgaattgctcgactatttggcgcgcgacagtaaaaccagcgccatcctgctctatctcgaacaattaagtgatgcgcgacgttttgtttcggcggcccgtagcgcctcacgtaataaaccgattctggtgattaaaagcggacgtagcccggcggctcaacgtctgttgaacaccacggcaggaatggatccggcgtgggatgcagctattcagcgtgccggtttgttgcgggtacaggacacccacgaactgttttcggcggtggaaacccttagccatatgcgcccgctgcgtggcgaccggttgatgattatcagcaacggtgctgcgcctgccgcgctggcgctggatgccttatggtcacgcaatggcaagctggcaacgctaagcgaagaaacctgccagaaactgcgcgatgcactgccagggcatgtggcaatctctaacccgctcgatctgcgcgatgacgccagcagcgagcattatgtcaaaacgctggacattctgctccacagccaggattttgatgcgctgatggttattcattcgcccagcgccgctgctcccgcaacagaaagcgcgcaagtattaattgaagcggtaaagcatcatccccgcagcaaatatgtctctttgctgacgaactggtgcggcgagcactcctcgcaagaggcacgacgtttattcagcgaagccgggctgccgacctaccgtactccggaaggaaccatcactgcttttatgcatatggtcgagtaccggcgtaatcagaagcaactacgcgaaacgccggcgttgcccagcaatctgacttccaataccgcagaagcgcatcttctgttgcaacatgcgattgccgaaggggctacgtcgctcgatacccatgaagttcagcccatcctgcaagcgtatggtatgaatactctccctacctggattgccagtgatagcaccgaagcggtacatattgccaaacagattggctatccggtggcactgaaattgcgctcgccggatattccacataaatcggaagttcagggcgtcatgctctacctacgtacagccaatgaagtccagcaagcggcaaacgctattttcgatcgcgtaaaaatggcctggccgcaggcgcgggtccacggcctgttggtgcaaagtatggctaaccgtgctggcgctcaggagttgcgggttgtggttgagcacgatccggttttcgggccgttaatcatgctgggtgaaggcggtgtggagtggcgtcctgaagatcaagccgtcgtcgcactgccgccgctgaacatgaacctggcccgctatctggttattcaggggatcaaaagtaaaaagattcgtgcacgcagtgcgctacgcccattggatgttgcaggcttgagccagcttctggtgcaggtttccaacttgattgtcgattgcccggaaattcagcgtctggatattcatcctttgctggcttctggcagtgaatttaccgcgctggatgtcacgctggatatcgcgccgtttgaaggtgataacgagagccggctggctgtgcgcccttatccgcatcagctggaagaatgggtagaattgaaaaacggtgaacgctgcttgttccgcccgattttgccagaagatgagccacagcttcagcaattcatttcgcgagtcaccaaagaagatctttattaccgctactttagcgagatcaacgaatttacccatgaagatttagccaacatgacgcagatcgactacgatcgggaaatggcatttgtagcggtacgacgaattgatcaaacggaagagatcctcggcgtcacacgtgcgatctccgaccctgataacatcgatgccgaatttgccgtgctggttcgctcggatctcaaagggttaggcttaggtcgacgcttaatggaaaagttgattacctatacgcgagatcacggactacaacgtctgaatggtattacgatgccaaacaatcgtggcatggtggcgctggcccgcaagctcgggtttaacgttgatatccagctcgaagaggggatcgttgggcttacgctaaatcttgcccagcgcgaggaatcatgagtaaggtactggaaatgttgaccacttaatcgggactggtgttattattgcccgcttatgtcgtctgcattgcacagaggacccttcaatgaacagagaagaaatgcactgtgatgttgtcaaaatttaagcgtaataaacatcaacaacaccttgcccaactacccaagatttctcaatcagttgatgatgtcgatttcttttacgctcccgccgacttccgggagacgctgctggaaaaaatagccagcgcgaagcagcgcatttgcattgtcgccctgtatctcgaacaggatgacggtggcaaaggcattctgaacgcgttgtatgaggctaaaaggcagcgtccggaactggatgtgcgggtgctggtcgactggcatcgtgcacaacgtggacgcattggcgctgcggcatctaacactaacgctgactggtactgccgcatggcgcaggaaaatccgggcgtagatgttccggtttatggcgttccaatcaatacccgtgaagcccttggtgttctgcactttaaaggctttatcatcgacgatagcgtactttatagcggtgccagcctgaacgatgtttacctgcatcagcacgataaatatcgctacgaccgttatcatctgatccgtaaccgtaagatgtcagacattatgtttgaatgggttacacagaatattatgaatggccgcggcgttaatcgtctggatgatgttaatcggccaaaaagcccggaaatcaagaacgatattcgtctgttccgccaggagctgcgtgatgccgcttatcatttccagggcgatgccgacaacgatcagctttccgtaacgccgctagtggggctggggaaatcgagtctgttgaacaagactattttccatcttatgccttgtgccgagcagaaactaaccatctgcacaccttacttcaacctaccagcaatccttgtgcgcaatattatccagttgctgcgcgaagggaaaaaggtcgaaattattgttggtgataaaaccgcgaatgacttctacattccggaagatgaacctttcaagataattggcgcattgccttatctctatgagatcaatctgcgtcgtttcctgagtcgtttacagtattacgtcaacactgaccagttagtagttcggttatggaaagatgacgacaacacctatcacctgaaagggatgtgggttgatgataagtggatgttgatcaccggtaataacctgaacccgcgcgcctggcgtctggatctggaaaacgccattttgatccacgatccgcaactggagcttgcgccacagcgagagaaagaactggatctgatccgcgagcataccaccatcgttaagcactaccgcgatctgcaaagtattgccgattatccggtgaaggttcgtaaactcatccgccgtttgcgccgtatccgcatcgaccgattaattagccgcatcctgtaatcacaaccccgtcctgtacggggtttgttttttggaggccacgttttgcgtattctttttgtctgttcgctattgttactttctggatgcagccatatggctaacgatagctggagcgggcaggataaagctcaacactttatcgcctcggcgatgctttccgccgccggaaatgaatattcacagcatcaggggatgagccgggatcgcagtgccatgtttggattgatgttctctgtcagtctgggggcgtcaaaagagctttgggatagccgccctgaggggagcggctggagctggaaggattttgcctgggatatcgccggtgcaagcaccggctataccgtctggcaactgacccgtcactaaagccgcatcccttttcctttacggtgcaatgttagtgaaaccagaaacgccaccacggccatcaaggtcacataccagaagaaggctgtttccattcctattgatttcagcgacaacgctacgtactccgccgacccaccaaatatagcattggcgaccgcatatgacagaccaacgcctaatgcgcgaacctgtgccgggaacatctcagccttcagtattccactgattgaagtataaaaactcactatcagcagggcgcacatcaccagaccaaaagcggcataaggcgaggaaacgttctgcaatgctgagagaataggaacggtaaaaatggttgccagagaaccgaaacataacattgaggtacggcgaccaatcttatccgacagcgcgccaataagtggttgaataagcatgaatacaaacaatgcggcagtcataatgccactcgccacgttggcatgcattcccgcagtatttaccagatacttctgcatataagtggtgaaggtatagaaacaaagggagcccgcagcggtaaaaccgagaaccatgatgaatgcacggcgattgcgccataatcctttcagagatccagcttcttttaaagcgcgtgtttcttgttgtgaagtttcatctaactgacgacgtaaccacaacgccacaacagctaacacagcccctaacgcgaaaggaatacgccatccccactctctgagtacagcgtcttccatggtgtgttgtaaaaccacgacaaccagtagagctagcagttgcccgccgatcaacgtcacatactgaaatgatgcgtaaaaacctttgcgcccttcaacggcaacttcactcatataggtggcgctggtgccatattctccgccaacggataatccctggaataaacgcgcgagaagcaataatgccggagcccaggtaccgattgtttcgtagcctggcaaacaggcgataaccagtgagccgaaacacatcatacacaccgataacagcatcgattttttgcgaccatgtttatcggctatgcggccaaacagccaaccgcctattgggcgcatcagaaatcctgcagcaaaaacacctgctgtttgcagtagttgagtcgtcgtgttcccggaagggaagaagatgtgggcgaagtagagtgaacagaacgagtagacatagaaatcgaaccactcgaccagattacctgaagaggccccaacaattgcccaaatgcggcgacgagtatcactacttgtcagtttgctgtctgccgttacagtactttcagccatgccattatgtctcctgccgtaatccaatgcttttgtcggtcgcttttgtttattttttggtaagaaaaatgttatacatttgttgcatatcattatgcaaccttaaccatgaatttagttagcaggaaaatggttattaaggagcttaaggatagatttctggtaaggaggaagtatggaagtgggcaatttggggaagacgtattcgctgttgaatctggcttatgtgggagtataagacgcgccagcgtcgcatccggcatttattccgcaccaacgcaaaaaagcccagtcttccgactgggcctttcgcttaatttgatgcctggcagttccctactctcgcatggggagaccccacactaccatcggcgctacggcgtttcacttctgagttcggcatggggtcaggtgggaccaccgcgctaaggccgccaggcaaattctgtttcattaacccgcttgtcgccggttaatctaatctgtatcaggctgaaaatcttctctcatccgccaaaacatcttcggcgttgtaaggttaagcctcacggttcattagtaccggttagctcaacgcatcgctgcgcttacacacccggcctatcaacgtcgtcgtcttcaacgttccttcaggaccctcaaggagtcagggagaactcatctcggggcaagtttcgtgcttagatgctttcagcacttatctcttccgcatttagctaccgggcagtgccattggcatgacaacccgaacaccagtgatgcgtccactccggtcctctcgtactaggagcagcccccctcagttctccagcgcccacggcagatagggaccgaactgtctcacgacgttctaaacccagctcgcgtaccactttaaatggcgaacagccatacccttgggacctacttcagccccaggatgtgatgagccgacatcgaggtgccaaacaccgccgtcgatatgaactcttgggcggtatcagcctgttatccccggagtaccttttatccgttgagcgatggcccttccattcagaaccaccggatcactatgacctgctttcgcacctgctcgcgccgtcacgctcgcagtcaagctggcttatgccattgcactaacctcctgatgtccgaccaggattagccaaccttcgtgctcctccgttactctttaggaggagaccgccccagtcaaactacccaccagacactgtccgcaacccggattacgggccaacgttagaacatcaaacattaaagggtggtatttcaaggtcggctccatgcagactggcgtccacacttcaaaagcctcccacctatcctacacatcaaggctcaatgttcagtgtcaagctatagtaaaggttcacggggtctttccgtcttgccgcgggtacactgcatcttcacagcgagttcaatttcactgagtctcgggtggagacagcctggccatcattacgccattcgtgcaggtcggaacttacccgacaaggaatttcgctaccttaggaccgttatagttacggccgccgtttaccggggcttcgatcaagagcttcgcgttgccgctaaccccatcaattaaccttccggcaccgggcaggcgtcacaccgtatacgtccactttcgtgtttgcacagtgctgtgtttttaataaacagttgcagccagctggtatcttcgactgatttcagctccacgagcaagtcgcttcacctacatatcagcgtgccttctcccgaagttacggcaccattttgcctagttccttcacccgagttctctcaagcgccttggtattctctacctgaccacctgtgtcggtttggggtacgatttgatgttacctgatgcttagaggcttttcctggaagcagggcatttgtcgcttcagcaccgtagtgcctcgtcatcacgcctcagccttggttttccggatttgcctggaaaaccagcctacacgcttaaaccgggacaaccgtcgcccggccaacatagccttctccgtccccccttcgcagtaacaccaagtacaggaatattaacctgtttcccatcgactacgcctttcggcctcgccttaggggtcgactcaccctgccccgattaacgttggacaggaacccttggtcttccggcgagcgggcttttcacccgctttatcgttacttatgtcagcattcgcacttctgatacctccagcaaccctcacaggccaccttcacaggcttacagaacgctcccctacccaacaacacatagtgtcgctgccgcagcttcggtgcatggtttagccccgttacatcttccgcgcaggccgactcgaccagtgagctattacgctttctttaaatctgtctcacgacgttctaaacccagctcgcgtaccactttaaatggcgaacagccatacccttgggacctacttcagccccaggatgtgatgagccgacatcgaggtgccaaacaccgccgtcgatatgaactcttgggcggtatcagcctgttatccccggagtaccttttatccgttgagcgatggcccttccattcagaaccaccggatcactatgacctgctttcgcacctgctcgcgccgtcacgctcgcagtcaagctggcttatgccattgcactaacctcctgatgtccgaccaggattagccaaccttcgtgctcctccgttactctttaggaggagaccgccccagtcaaactacccaccagacactgtccgcaacccggattacgggccaacgttagaacatcaaacattaaagggtggtatttcaaggtcggctccatgcagactggcgtccacacttcaaaagcctcccacctatcctacacatcaaggctcaatgttcagtgtcaagctatagtaaaggttcacggggtctttccgtcttgccgcgggtacactgcatcttcacagcgagttcaatttcactgagtctcgggtggagacagcctggccatcattacgccattcgtgcaggtcggaacttacccgacaaggaatttcgctaccttaggaccgttatagttacggccgccgtttaccggggcttcgatcaagagcttcgcgttgccgctaaccccatcaattaaccttccggcaccgggcaggcgtcacaccgtatacgtccactttcgtgtttgcacagtgctgtgtttttaataaacagttgcagccagctggtatcttcgactgatttcagctccacgagcaagtcgcttcacctacatatcagcgtgccttctcccgaagttacggcaccattttgcctagttccttcacccgagttctctcaagcgccttggtattctctacctgaccacctgtgtcggtttggggtacgatttgatgttacctgatgcttagaggcttttcctggaagcagggcatttgtcgcttcagcaccgtagtgcctcgtcatcacgcctcagccttggttttccggatttgcctggaaaaccagcctacacgcttaaaccgggacaaccgtcgcccggccaacatagccttctccgtccccccttcgcagtaacaccaagtacaggaatattaacctgtttcccatcgactacgcctttcggcctcgccttaggggtcgactcaccctgccccgattaacgttggacaggaacccttggtcttccggcgagcgggcttttcacccgctttatcgttacttatgtcagcattcgcacttctgatacctccagcaaccctcacaggccaccttcacaggcttacagaacgctcccctacccaacaacacatagtgtcgctgccgcagcttcggtgcatggtttagccccgttacatcttccgcgcaggccgactcgaccagtgagctattacgctttctttaaatgatggctgcttctaagccaacatcctggctgtctgggccttcccacatcgtttcccacttaaccatgactttgggaccttagctggcggtctgggttgtttccctcttcacgacggacgttagcacccgccgtgtgtctcccgtgataacattctccggtattcgcagtttgcatcgggttggtaagtcgggatgacccccttgccgaaacagtgctctacccccggagatgaattcacgaggcgctacctaaatagctttcggggagaaccagctatctcccggtttgattggcctttcacccccagccacaagtcatccgctaatttttcaacattagtcggttcggtcctccagttagtgttacccaaccttcaacctgcccatggctagatcaccgggtttcgggtctataccctgcaacttaacgcccagttaagactcggtttcccttcggctcccctattcggttaaccttgctacagaatataagtcgctgacccattatacaaaaggtacgcagtcaccccattaagaggctcccactgcttgtacgtacacggtttcaggttctttttcactcccctcgccggggttcttttcgcctttccctcacggtactggttcactatcggtcagtcaggagtatttagccttggaggatggtccccccatattcagacaggataccacgtgtcccgccctactcatcgagctcacaatatgtgcatttttgtgtacggggctgtcaccctgtatcgcacgcctttccagacgcttccactaacacacacactgattcaggctctgggctcctccccgttcgctcgccgctactgggggaatctcggttgatttcttttcctcggggtacttagatgtttcagttcccccggttcgcctcattaacctatggattcagttaatgatagtgtgtcgaaacacactgggtttccccattcggaaatcgccggttataacggttcatatcacctcaccgacgcttatcgcagattagcacgtccttcatcgcctctgactgccagggcatccaccgtgtacgcttagtcgcttaacctcacaacccgaagatgtttcttgcgattcatcatcgtgttgcgaaaatttgagagactcacgaacaactctcgttgttcagtgtttcaattttcagcttgatccagatttttaaagagcaaatatctcaaacatcacccgaagatgagttttgagatattaaggcaggtgactttcactcacaaaccagcaagtggcgtcccctaggggattcgaacccctgttaccgccgtgaaagggcggtgtcctgggcctctagacgaaggggacgtgtcagtctgcttcgcaagacgccttgcttttcacttttcatcagacaatctgtgtgagcactgcaaagtacgcttctttaaggtaaggaggtgatccaaccgcaggttcccctacggttaccttgttacgacttcaccccagtcatgaatcacaaagtggtaagcgccctcccgaaggttaagctacctacttcttttgcaacccactcccatggtgtgacgtcaaacattaaagggtggtatttcaaggtcggctccatgcagactggcgtccacacttcaaaagcctcccacacatcaaggctcaatgttcagtgtcaagctatagtaaaggttcacggggtctttccgtcttgccgcgggtacactgcatcttcacagcgagttcaattttttcatcagacaatctgtgtgagcactgcaaagtacgcttctttaaggtaaggaggtgatccaaccgcaggttcccctacggttaccttgttacgacttcaccccagtcatgaatcacaaagtggtaagcgccctcccgaaggttaagctacctacttcttttgcaacccactcccatggtgtgacggcggtgtgtacaaggcccgggaaagtattcaccgtggcattctgatccacgattactagcgattccgacttcatggagtcgagttgcagactccaatccgactacgacgcactttatgaggtccgcttgctctcgcgaggtcgcttctctttgtatgcgccattgtagcacgtgtgtagccctggtcgtaagggccatgatgacttgacgtcatccccaccttcctccagtttatcactggcagtctcctttgagttcccggccggaccgctggcaacaaaggataagggttgcgctcgttgcgggacttaacccaacatttcacaacacgagctgacgacagccatgcagcacctgtctcacggttcccgaaggcacattctcatctctgaaaacttccgtggatgtcaagaccaggtaaggttcttcgcgttgcatcgaattaaaccacatgctccaccgcttgtgcgggcccccgtcaattcatttgagttttaaccttgcggccgtactccccaggcggtcgacttaacgcgttagctccggaagcnacgcctcaagggcacaacctccaagtcgacatcgtttacggcgtggactaccagggtatctaatcctgtttgctccccacgctttcgcacctgagcgtcagtcttcgtccagggggccgccttcgccaccggtattcctccagatctctacgcatttcaccgctacacctggaattctacccccctctacgagactcaagcttgccagtatcagatgcagctcccaggttgagcccggggatttcacatctgacttaacaaaccgcctgcgtgcgctttacgcccagtaattccgattaacgcttgcaccctccgtattaccgcggctgctggcacggagttagccggtgcttcttctgcgggtaacgtcaatgagcaaaggtattaactttactcccttcctccccgctgaaagtactttacaacccgaaggccttcttcatacacgcggcatggctgcatcaggcttgcgcccattgtgcaatattccccactgctgcctcccgtaggagtctggaccgtgtctcagttccagtgtggctggtcatcctctcagaccagctagggatcgtcgcctaggtgagcctttaccccacctactagctaatcccatctgggcacatccgatggcaagaggcccgaaggtccccctctttggtcttgcgacgttatgcggtattagctaccgtttccagtagttatccccctccatcaggcagtttcccagacattactcacccgtccgccactcgtcagcaaagcagcaagctgcttcctgttaccgttcgacttgcatgtgttaggcctgccgccagcgttcaatctgagccatgatcaaactcttcaatttaaaagtttgatgctcaaagaattaaacttcgtaatgaattacgtgttcactcctgagacttggtattcatttttcgtcttgcgacgttaagaatccgtatcttcgagtgcccacacagattgtctgataaattgttaaagagcagtgccgcttcgctttttctcagcggcgcggggtgtgcataatacgctttcccgccacagagtcaagcatttatttttgctttctctgccggaattctcaggagaatcccgctgacccggcggcgtgtttgccgttgttccgtgtcagtggtggcgcattatagggagttattccggcctgacaagcaaaaaatataaaaactttattgttcgctcatttttcaggcaaaacatctttaatatagtcttttccgtctaacttatagacaaaaacgagccccgaaggctcgttttatcattactggacggcgacgatccggtcttcattaacttccaggcgaataactttacccggaaccaattcaccagacagtatttgctgtgccagcgggttttcgatctgctgctggatagcacgtttcagaggacgtgcaccatagaccggatcgtaaccgttctcgctcagcagtttcagcgcctcgtcagaaatgtggatttcataaccacgttcttccagacgtttgtacagacgtttcaactgaatctgcgcaatcgacgcaatgtgttgttcacccagcggatggaagacgacgacttcatcgatacggttaatgaattccggacggaagttatggcttaccacaccgagcaccagctctttcatgtgcgcataatccagttcaccaaaacgttcctgaatcagatcggaaccgaggttagaggtcataatgacgaccgtattacggaagtcgaccgttctcccctgcccgtcagtcagacgcccatcatccagtacctgcaacagaatgttgaagacatccggatgcgctttttccacttcatccagcaggatgacggaatacgggcgacgacgcaccgcttcggtcagatagccaccttcttcataaccaacatatcccggaggcgcaccaaccagacgagacaccgagtgtttctccataaactcggacatatcgatacggaccatcgcctcgtcgctatcaaacataaagttcgccagcgccttacaaagctctgttttccccacacccgttgggccgaggaacaggaatgaaccaatcgggcgatttggatccgccagccccgcacggctacgacgaatagcgttagataccgcatcaaccgcttcgtgctgaccaataacgcgatggtgcagttcttgctccatacgcagcagtttttcgcgctcgctttccatcatgcgagaaaccggaattcccgtccaacgcgccagcacttcagcaatttcggcatcggtcactttattacgcaacagacgcatagttttgccttcgagctgcgttgcggcttccagttgcttttccagttccgggattttgccgtattgcagttcagacatccgcgccaggtcacccacacggcgagcctgttcaatagcgattttcgcctgttccagttccgctttaatggtctgcgtaccagaaagcgaggctttctctgctttccactcttcttctaactcggagtactgacgttctttgtcgctcagttcttcgttgagcatatccaggcgttttttactggcttcatcagactctttcattaacgcctgttgttccagtttgagctggatgatacgacgatcgagtcggtcgagttcttctggttttgagtcaatctgcatacgaatgctggatgctgcttcatcgatcaggtcgatggctttatccggcagctgacggtcagcaatgtagcgatgagacaacgtcgctgctgcaacaattgccgggtcagtaatttgcacatggtggtgcagctcgtaacgttctttcaggccacgcagaatagcaatggtatcttcaacagaaggctcggcaacaaacactttctggaaacgacgttccagcgcagcatctttttcgatgtactggcgatattcgtcaagcgtcgtggcacctacgcagtgcaattcaccacgcgccagtgcaggtttcagcatgtttccggcgtccattgcgccatcggctttacccgcgccgaccatggtatgtaattcgtcgataaacaggatgacgttgccttcctgtttagcaagatcgttaagtacgccttttaaacgttcttcaaactcaccgcgatatttcgccccagccaccagcgcgcccatatccagcgccagtacgcggcggcctttcaacccttcgggcacttcgccgttgataatacgctgcgccagaccttcaacgatggcagttttaccgacgccgggttcaccaatcaataccgggttatttttagtacgacgttgcagcacctgaatggtacggcgaatttcttcatcacgaccaatcaccggatcgagtttgccttgttcggctcgttcggtaaggtcgatggtatattttttcaaagcctgacgttggtcttcagcaccttgatcgttcacgctttcacctccacgcatttgttcaatcgcttgagtaatgttggcggtggtcgcccctgctgctttcaggatgtcggccagcgtgccgcgagactcaagtgccgccagaacgaacagttctgacgagataaagttatcaccacgtttttgcgccagcttgtcgcaaagattaagaacgcgcaccagatcctgtgatggctggacatcaccaccagtaccttcaacctgcggtaaacgatttaatgcctgatttatatctgtgcgcaactggccagcatttatgccagcggatgttaataaaggactaaccgaacccccttcctgattcagcagggcgctcattaaatgaagtggttcgatgaattggttgtcgtgcccgagtgcaagtgattgggcatcggcaagagcaagctggaatttattagtaagacgatccagacgcataactcctcccataacggatcaaagttgctactggagattaaatgaggtcatccctcaattattcaaggttattgaccagattaatgtgaaaagaaaatcacgcgtaccggatcgtcttgattctttaggttatatcagccaaatgaaacttgccatacgaccggtggtcttgtcgcgacgataagagaagaaagtctcattttccgtatatgtacaacggtcgccgccgaaaatttgttcaacaccaacgctcgccagacgctgccgggcaagctgataaatatccgccagatacttatcaccatgctgaatgaaagctgtactcgctttggcgtctactgccataaacgcctcgcgaacctccgcccccacttcaaacgcgcgtggaccaattgccggccctaaccaggcgagaatattttccggattatcagcaaaacaggaaaccgtctcttccagcacgcctgcgcacagtccacgccagccagcatgagcggcggcgacttccgttcccgctcgattgcaaaacagcacagggaggcaatcggcagtcatcactgcgcaaaccgtgccgggcgtattgctataagaggcatctgctcgttttgaggcataaggttcaccagtaagcttaagcacatctttgccgtgtacctgctcaagccagaccggtttagaaggcaaattgcccgcagcaaaaagtcgcttgcgattctcctcaacgtgatccgggttatcaccacaatgagcgccaaggttgagagagtcgtaaggcggcaagctcacgccgccgatacgggtagagctacaggccgcaacaccttttggcagcggccactgcgggacaatcagcttactcataaccagtccacttcatccttatgctcttcgaaatcggcgcgcatcacctcaatcagctccaccatatcttgtggaataggcgcatgccattccatttcgataccggagatcgggtgataaagacgcagcatggttgcatgaagcgcctggcggtcaaacttacgcagcgtggagataaacgcttccgaagcaccttttggcggacgcggacggccaccataaaccggatcgcccaccagcggatgagtgatatgggccatatgcacgcggatctggtgcgtacgtccagtttccagacgcaaccgcagacgcgtgtgcacacggaagtgttccatgatgcgatagtgtgtgaccgccggtttacccatcggatgcaccgccatgtgagtacgtttggtcgggtggcggctgattggttcatctactgtaccgccagcggtcatatgaccaattgccaccgcttcatactcacgagtaatttcacgccgttgcaaagattcgactaaacgcgtctgagccggaacggtttttgccacaaccatcaggccggtggtgtctttatccagacgatggacgatgcccgcacgcggtacatcggcaatgggcggatagtaatgaagcaacgcattcagtaccgtaccatccgggttacccgcgccaggatgtaccaccaggtcgcgtggtttattaatgacgatgatatcttcatcttcatagacgatatccagcgggatatcctgcggttcaaaacgcgcttcttcttcaatctcagcgttgatggccacctgctcgccacccaatactttttctttcggcttatcacacactttgccgttaaccagcacgcgctggtcgaggatccattcttttattcgcgaacgtgaataatccgggaacatttcggccaaagcctgatctaagcgttgaccgagttggttttcggacaccgttgcagtgagctgtactcgttgtgccatatatactgcttcttcgtttatcgttggggttttacggctttgccgtttaatatagtgtgctattgtagctggtcttaaccgggagcaggaacagagaatctcccgtattacattttgaggaaagtcaaaacgtcatgacgcgcatgaaatatctggtggcagccgccacactaagcctgtttttggcgggttgctcggggtcaaaggaagaagtacctgataatccgccaaatgaaatttacgcgactgcacaacaaaagctgcaggacggtaactggagacaggcaataacgcaactggaagcgttagataatcgctatccgtttggtccgtattcgcagcaggtgcagctggatctcatctacgcctactataaaaacgccgatttgccgttagcacaggctgccatcgatcgttttattcgccttaacccgacccatccgaatatcgattatgtcatgtacatgcgtggcctgaccaatatggcgctggatgacagtgcgctgcaagggttctttggcgttgaccgtagcgatcgcgatcctcaacatgcacgagctgcgtttagtgacttttccaaactggtgcgcggctatccgaacagtcagtacaccaccgatgccaccaaacgtctggtattcctgaaagatcgtctggcgaaatatgaatactccgtggccgagtattatacagaacgtggtgcatgggttgctgtcgttaaccgcgtagaaggcatgttgcgcgactatccggatacccaggctacgcgtgatgcgctgccgctgatggaaaatgcataccgtcagatgcagatgaatgcgcaagctgaaaaagtagcgaaaatcatcgccgcaaacagcagcaatacataacagaaacctgaaacacaaaacggcagccttgagctgccgtttttttattctgttagttgtgaaactgaagcgatttagtcactatcgatctcatcaaatatggctcgctttgagatattcctcaagtaaaaaaacacctcttcctgcgatttctcacaaaaaagattcgttgacaaaaagtgacaaaattatgagatttccatcacacattttgacatcaggaacgttatgctgaattcaccaagacgggaagacaagaggtaaaatttatgacaatgaacattaccagcaaacaaatggaaattactccggccatccgccaacatgtcgcagaccgtctcgccaaactggaaaaatggcaaacacatctgattaatccacatatcattctgtccaaagagccacaagggtttgttgctgacgccacaatcaatacacctaacggcgttctggttgccagtggtaaacatgaagatatgtacaccgcaattaacgaattgatcaacaagctggaacggcagctcaataaactgcagcacaaaggcgaagcacgtcgtgccgcaacatcggtgaaagacgccaacttcgtcgaagaagttgaagaagagtagtcctttatattgagtgtatcgccaacgcgccttcgggcgcgttttttgttgacagcgtgaaaacagtacgggtactgtactaaagtcacttaaggaaacaaacatgaaacacacaccgtttttcttcgcattcttttttaccttcccctgaatgggaggcgtttcgtcgtgtgaaacagaatgcgaagacgaacaataaggcctcccaaatcggggggccttttttattgataacaaaaaggcaacactatgacatcggaaaacccgttactggcgctgcgagagaaaatcagcgcgctggatgaaaaattattagcattactggcagagcgacgcgaactggccgtcgaggtgggaaaagccaaactgctctcgcatcgcccggtacgtgatattgatcgtgaacgcgatttgctggaaagattaattacgctcggtaaagcgcaccatctggacgcccattacattactcgcctgttccagctcatcattgaagattccgtattaactcagcaggctttgctccagcaacatctcaataaaattaatccgcactcagcacgcatcgcttttctcggccccaaaggttcttattcccatcttgcggcgcgccagtatgctgctcgtcactttgagcaattcattgaaagtggctgcgccaaatttgccgatatttttaatcaggtggaaaccggccaggccgactatgccgtcgtaccgattgaaaataccagctccggtgccataaacgacgtttacgatctgctgcaacataccagtttgtcgattgttggcgagatgacgttaactatcgatcattgtttgttggtctccggcactactgatttatccgccatcaatacggtctacagccatccgcagccattccagcaatgcagcaaattccttaatcgttatccgcactggaagattgaatataccgaaagtacgtctgcggcaatggaaaaggttgcacaggcaaaatcaccgcatgttgctgcgttgggaagcgaagctggcggcactttgtacggtttgcaggtactggagcgtattgaagcgaatcagcgacaaaacttcacccgatttgtggtgttggcacgtaaagccattaacgtttctgaccaggttccggcgaaaacgacgttgttaatggcgaccggacaacaagctggtgcactggttgaagcgttgctggtactgcgcaatcacagtctgattatgacccgtctggaatcacgtccgattcacggtaatccgtgggaagagatgttttatctggatattcaggccaatcttgaatcagcggaaatgcaaaaagcattgaaagagttaggggaaatcacccgttcgatgaaggtattgggctgttacccaagtgagaacgtagtgcctgttgatccaacctgatgaaaaagtgccggatgatgtgaatcatccggcactggattattactggcgattgtcattcgcctgacgcaataacacgcggctttcactctgaaaacgctgtgcgtaatcgccgaaccagtgctccaccttgcggaaactgtcaataaacgcctgcttatcgccctgctccagcagctcaatcgcctcgccgaaacgcttatagtaacgtttgattaacgccagattacgctctgacgacataataatgtcggcataaagctgcggatcctgagcaaacagtcgcccgaccatcgccagctcaaggcggtaaatcggcgaagagagcgccagtagttgctcaagctgaacattttcttctgccaggtgcagcccataagcaaaagtagcaaagtggcgcagagcctgaataaacgccatattctgatcgtgctcgacagcgctaatacgatgcaaccgagcgccccagacctgaatttgctccagaaaccattggtatgcttccggcttacgtccatcacaccagaccacaacttgctttgccaggctaccgctgtccgggccgaacatcgggtgtaaccccagcaccgggccatcgtgcgccgccagcatggcctgtaatggtccatttttcaccgatgccagatcaaccagaatacaatctttcggtaaaggcggtaatttgccgataacttgctcagtaacgtggatgggcacactaacaatcaccattccggcatcggaaacaatatcagccgctcgatcccagtcatgttgctccagaatccgcacctgataacccgagagtgtcagcatcttctcgaacagacgtcccatctgaccgccaccaccgacgataaccaccgggcgcagtgacggacaaagcgttttaaatcctttgtcgttttcactggagtaagattcacgcatcacccgacgcaaaacatcctcaatcagatctggcggtacacccagagcttccgcctctgcacgacgcgaggccaacatagatgcctcgcgctccggaacataaataggcagtccaaagcggcttttcacctcgcccacttcagcaaccagttccagacgcttcgctaataaattcagcagcgctttatcgacttcatcaatttgatcgcgtaatgcggtcaattcagcaaccataataaacctcttaagccacgcgagccgtcagctgcccgttcagatcctgatgaatttcacgcagcaaggcatcggtcatttcccagctaatgcaggcatcggttacggatacaccgtatttcatttcactgcgcggttgctcggaagactgattgccctcgtggatattactttcgatcatcagaccaataattgagcgattgccatctttgatttgagcaaccacggattctgccaccgcaggctgacggcgataatctttattggaattaccgtggctgcaatctaccatcagagacgggcgcagtcccgcctgttccatctctttttcacattgcgcaacatccgcagggctatagtttggcgctttaccaccgcgcaggatcacatgcccgtccggattcccctgagtttgtagcaacgcaacctgccctgcctggttaatgccaacaaaacggtgcggctgggcggcggcacgcatagcgttaattgccgttgccagactgccatcggtgccgtttttaaaaccaaccggcatggaaagcccggaggccatttcacggtgagtttgcgattccgttgtacgagcaccaattgctgaccagctaaacagatcgcccaggtattgcgggctattcggatctaacgcttccgtcgccagtggcagtcccatattcaccagctcaagcagcaatttacgcgcgatctgcagcccggcttctacatcaaaagagccatccatatggggatcgttaattaaccctttccagccgacagtggtacggggtttttcaaaatagacgcgcattaccagatagaggctatcgctgacctctgcggcaagggctttaaatcgacgagcatattccagagcagtttccggatcatgaatggaacaaggaccacatactaccagcagacgaggatcgcgcccggcgataatatctgaaatggttttacgcgagtcagcaatctgggcttcttgttgcaggcttaatggaaaagcggccttcagttgttccggagtcattaaaacctgttcgtcggtaatatgtacgttattcagcgcgtctttctgcatgatggcgatcctgtttatgctcgtttgcgatagttgatcctcagcgaggatgacgtaacgataacacataaagtaaagttttcaatccatatttcgtacatatttctttacacaagcaatttattcgcgctttttccccttatttctgtataaataaatttacaccagctttaaaaacaatccgctatgctttgaaaaaggagaaaaaaatgatgaaaaaatttatcgcccccttgttggctttactggttagcggatgtcagattgatccttatactcacgcgccaaccttgaccagcaccgactggtatgatgttggtatggaagatgcgatatcgggcagcgccattaaagatgacgatgcatttagcgattcacaggcggatcgcggtctataccttaaaggatatgccgaagggcaaaagaaaacttgccagaccgattttacttatgcccggggactttctggtaaaagctttcctgccagctgcaataatgttgaaaataccagccaactgcatgaagtatggcgaaaaggggctgatgaaaatgccagcacaatacgattaaattaattaccccccaaatcaattaagcatgagattttactcattatgttttatttctcacattgatgacgaccgcatgaaaggatgatattttaatgagcattctgaaaaaatatcgatgcatttcgagcgaagatggtgaggatccctgaatgcgtttttctcaccgactgttcttactgctgattctcctgctgacgggagcaccaatactcgctcaggaaccttctgacgttgcgaaaaacgtgcgtatgatggtttccggtattgtcagttacacccgctggcctgggctatcagggccaccaaagttatgtatcttttcatcttcacgttttagtaccgccttacaagaaaatgctgccacatctttaccttatctgcctgtcatcattcatactcaacaagaggcgataatttcaggctgcaatggtttttattttggcaacgagtcaccgacattccagatggaattaaccgaacaatatccgtcaaaggcgttattattaattgccgaacaaaataccgagtgcattattggtagcgccttttgtctgatcatccacaataatgacgtcagatttgccgtaaacctggatgccttatcgcgtagcggtgtaaaagtcaacccggatgtcttaatgctcgcacggaagaaaaatgatggataacgataattctcttaataagcgccccacgtttaaaagagcattacgcaacatcagtatgaccagcatatttatcactatgatgctgatctggctgctgctttccgtgacgtcagtgctgaccctgaaacagtacgcgcaaaaaaacctggcactgacagcagcaacaatgacttacagtctggaagcagctgtcgtttttgccgatggccctgcagcaactgaaacactggcagcgctgggccagcaaggccaattttcaactgcagaagtgcgtgataagcagcaaaatattctggcatcctggcattacacccataaggaaccaggcgatactttcagcaatttcataagccactggctcttccctgcccccatcattcagccgattcgccacaatggtgaaactattggcgaagtacgcttaactgctcgcgacagttcaatcagccattttatctggttttcgctcgctgtcctgaccggttgtattctgctggcatcaggcatcgcaattaccctcacccgccatttgcacaatggcctggtggaagcgctgaaaaatatcaccgatgtcgtacatgatgtgcgttctaaccgcaatttttcccgacgagtttcggaagaacgtatcgctgagtttcaccgcttcgctctcgacttcaacagtctgctggatgaaatggaagagtggcagcttcgtttacaggccaaaaatgcgcagcttctacgtaccgcgctacatgacccattaaccgggctggctaaccgcgcagcgtttcgtagcggcatcaacacgttgatgaacaattccgatgcccgaaaaacgtcggcgttactatttcttgatggcgataatttcaaatatatcaatgatacctggggtcatgcgacgggcgatagagtcttgattgaaatagcaaaacggttagctgaatttggcgggctgcgacataaagcataccgcctgggcggcgatgaattcgctatggtgctctatgatgtacagtcggaatctgaagtgcagcagatatgctcagcactgacacaaatttttaatctcccgtttgatcttcataatggccatcagactaccatgacattaagcattggttacgcgatgactattgagcacgcctctgcggaaaatttacaagagcttgccgatcacaatatgtatcaggccaaacaccagcgtgccgaaaagctggtgagataacaaggatatatcgatatgataaagcacctgctagcacccctgattttcacctcgctaatacttactggctgccagtcccctcagggaaagtttactcctgagcaagtcgccgctatgcaatcttatggatttactgaatccgccggcgactggtcgctgggcttatcagatgccattctgtttgcaaaaaatgactacaaattgctcccggaaagccagcaacagatccaaaccatggcagccaaattggcctcgacagggctaacacatgcccgtatggatggacacaccgacaactatggtgaagacagttacaacgaagtcttatcattgaaacgggcgaatgtcgtggccgatgcatgggctatgggtggacaaattccgcgcagcaatctcaccactcagggtttaggaaaaaaatatcccatagccagtaacaagaccgcccagggccgcgccgagaaccgccgcgtcgcagtggtgattacaaccccttaaaacacgagcaaacagacaaaaaaagggccagccaattggccagcccttcttaacaggatgtcgcttaagcgaaatcttagttaagacgctctttgatacgagcagccttaccagtacgctcacgcaggtagtacagtttagctttacgaacagcaccacgacgtttgacagaaatgctgtcaactaccggagagtgagtctggaagacacgctcaacgccttcgccgttggaaattttacgaacagtgaatgcagagtgcagaccgcggttacgaatagcgataaccacgccctcgaatgcctgcagacgttttttggaaccttcaacaacccatactttcacttccacggtatcacccggacggaaggaaggtacgtcctgcttcatctgctcttgttcaagttgcttaataatgttgctcataatttaatctcttatcctgggtaaactgatatctcgggggcttacgccatcccatcatgtttatgttgctgttgtgcgtgttccgttttgaactccgccagcaaccttgcttgctcttcagtcagagccaggttttccagaagttcaggtcttctaagccaggtacggcccagcgactgtttcaaacgccagcgacgtatctcggcatggttgcccgacagtaacactggcggaacttccatcccttctaacacctcaggccgcgtatagtgcgggcaatccagcaatccttcagcaaaggaatcttccgttgccgaggcttcatgtcccagtactcccggaataaaccgggaaacggagtcaatcagcgtcattgctggtaactcaccaccactgagaacgtaatcgccgattgaccattcttcgtcaatttcggtttggatcacgcgctcatctataccttcgtagcgaccacacaccagaatcaatttttgattcgttgccagttcgctgacgcccgcttgatcaagcttgcgtccctgtggtgacagataaatcacctttgcgccttcgcccgccgcggcttttgctgcatgaatggcgtcccgcaagggttgcaccatcattaacatccccggtccgccgccgtaaggacgatcgtccacggtacggtgccggtcatgcgtgaagtcgcgaggactccagctctggatgctcagcaggccatttttaactgcccggccagttaccccgtaatcggtaattgcgcggaacatttcaggaaacaggctaattatgccaatccacatagcgccgtcttttaccgtttatccggtggtttaaaaaccaggatcccaatctacttcgattgaacgtgtagtgagatcgactttcttgataacctgcccatcgaggaacggtacgagacgttccttgataccaaacgcatctttcaggtttgccttaatgacgagaacgtcattagatccggtttccatcatatctacgactttaccgagatcgtagccttcagtggttactacctggcagcccatcaggtctttccagtagtagtccccctcttcaagctgaggcaactgcgatgaatccacgacaatttcacaattcgtcagcaggttcgccgcatcacgatcgtcaacgcctttcagcttgatgatcatgtcctgattgtggtgcttccagctttccagctggacttgctgccactgacccgccttctggataaaccagggctgatagtcaaaaatgctttcggcgtcttcggtggaagaaaacactctgagccacccacgaataccgtaagacgaccccatttttcccaaaacgatgggatcaacaggtgcttgcgcggtgagttgtttgctcatcatgaccaccgtgacagattaagctgctttgtttacttctttgatcagcgcagcaacgcgatcagaaatagttgcgccctggccaacccagtgagcgatgcgatccagatccaggcgagtgccttcttctttttcgctagcgattgggttgaagaaaccaacgcgctcgatgaagcgaccgttgcgtgcattacggctgtcagcgacaacaacctggtagaacggacgctttttagcgccgtgacgtgctaaacgaatagttaccataacatcctcttgtgtgaataaaacaaccggaccccatcgaggaacggagtccggtgtcatattaaaagcccgaaaattttactgatttctggagaaaatgcaatcagcagttaataactctgtcgcataaggtcatttagcgaccaggaaatcccggcggcatcatccctttcatgcttctcatcatcttcgccatcccgcccttcttcattttcttcatcatgcgctgcatgtcgtcgaactgtttcagaagacggttaacgtcctgcacctgcataccgcaaccggcagcgatacgacgcttacgcgaacctttgatgatttctggcttagcgcgctctttcatcgtcatcgagttgatgatggcttccatacgcaccagcactttatcgtccatctgtgacttgacgttatccgggatctgccccatgcccggtagcttgcccatcaggctagccatgccgcccatatttttcatctggcgcagctgctcaagaaagtcgttgagatcgaagccgtcgccttttttcagcttgctggctaatttctctgcctgcgcgcggtcaaccttgctttcgatatcttcgatcagtgacagtacgtcgcccatgccgagaatacgggaggcaatacggtccggatggaatggctccagcgcctcggttttctcgccaacaccgaggaacttgatcggtttgccagtgatgtgacgaatagagagcgccgcaccgccgcgggcatcgccgtccactttggtcaacactacaccggtaagcggtaacgcttcattgaatgcttttgccgtattggccgcatcctgaccggtcatggcatcgaccacaaacagggtttcaaccggattaatcgacgcatggacttgtttgatctcgtccatcatcgcttcgtcaacgtgcagacgaccggcagtatccaccagcagcacgtcgtagaatttcagtttggcttctttcagcgccgcgttaacgatatctaccggcttctgaccaacatcagaagggaagaaatcaacgcccacctgctctgccagcgtctcaagctgtttgattgccgccgggcgatagacgtcggcagaaaccaccagcactttcttcttgtgcttctcgcgcaggaacttaccgagtttaccaacgctggttgttttaccggcaccttgcaggcccgccatcagcacgaccgcaggcggttgcgcagccaggttcagggtctggttctcttcgcccatcgccgcaaccagttcgttacggacaattttgacgaactcctgccccggcgtcaggctcttattaacttcatgaccaaccgctttctcttttacgcgattgataaactcacgcactaccggcagagcgacgtccgcctccagcagcgccatgcgcacttcgcgcagcgtatcttttacgttgtcttcagtgaggcgtccacggccactgatattgcgcagcgtgcgcgacaaacgatcggttaaattatcaaacattgtctctcgcctggggtggaaacggttggccgcaatcgcgacacatcatcagtattttgccgcagtataacatgaaggcgtctttgttgttatgcaacggttggagcagcgttcacctgacgctatactgcttctctttcttattgctcaaactgtcgacattactatgcccgtttttgctctgctcgcgcttgtcgcctactccgtcagtcttgcgctgattgttcccggtctgctgcaaaaaaacggcggctggcggcgcatggctattatttctgcggtcatcgcgctggtctgccacgcaatcgctctggaagcccgcatcctgcccgacggtgatagcggacaaaacctcagcctgctgaacgttggttcattggtcagtttgatgatctgtacggtaatgaccattgtggcttctcgcaatcgtggctggttgttgctacccattgtctatgcctttgcgcttatcaacctggcgctggcgaccttcatgcccaatgaatacatcacccatctggaagcaacgccggggatgctggtgcacattggcttatcgcttttttcctatgccacgctaattatcgctgccctgtacgcgctgcaactggcgtggattgattaccaactgaagaacaagaagctggcgtttaaccaggaaatgcctccattgatgagtatcgagcgtaaaatgttccatatcacgcagattggcgtggtgctgctaacgctcactctttgcactggcctgttctacatgcacaacttatttagcatggaaaatatcgacaaggccgtgctctctatcgtggcgtggtttgtctatattgtgctgctgtggggacattatcatgaaggatggcgtggacgccgcgtcgtctggtttaacgttgcgggtgcagtcattctgacactggcctacttcggcagccgaattgtccagcagttaatcagctaaccccagaaaaggagtttcccctggaacacatttctactactacgttgatcattattctgatcatcatggtggtcatttcagcctatttttccggttcagaaactggaatgatgacactcaaccgctatcgcctgagacacatggcgaagcaaggtaatcgctcggcaaaacgcgtcgaaaaattactgcgcaagccagaccgcctgataagcctggtgttaatcggcaataatctggtcaatatccttgcttccgcactcggcactattgtcgggatgcgcttgtatggcgatgctggcgtggcaattgcgactggcgtgctgaccttcgtagtgctggtttttgctgaagtattgccgaaaaccattgccgcactgtacccggaaaaagtcgcctatccgagtagttttctactggcgccgctacaagtcctgatgatgccgctagtctggttactaaatgccatcacccgaattttgatgcgtatgatgggtattaaaaccgatatcgtagtcagcggctctttgagtaaagaagagttgcgcaccatcgtgcacgaatcacgctcacaaatttcccgtcgcaatcaggatatgctgctgtcggtgctcgatctggaaaagatgaccgtcgatgacatcatggtgccgcgcagtgaaattatcggtattgatatcaacgatgactggaaatcgattctgcgccaactctcccactcacctcacgggcgcatcgtgctctaccgtgattcgctggacgacgccatcagtatgctgcgtgtgcgtgaagcctggcgactcatgtcggagaaaaaagagttcaccaaagaaaccatgctacgcgccgcggacgagatctattttgtcccggagggtacgccgctcagcacacagttggtgaagtttcagcgcaacaaaaagaaagtcggactggtcgtcaacgagtatggagacattcagggactggtgacggtcgaagatattctcgaagagattgtcggcgatttcaccacgtcgatgtcgccaacacttgccgaagaggtcacgccgcaaaacgacggttcggtgattattgatggcactgccaacgtgcgagaaattaacaaagcctttaactggcatctaccggaagatgatgctcgtactgttaacggcgtcattctggaagcgctggaggagatcccggtagcaggcacccgcgtgcgtataggcgagtacgatatcgatattctcgacgtacaggacaatatgattaagcaggtaaaagtttttcctgtaaaaccgctgcgcgagagtgtggcggagtaacgaaaacggcccggcattcgcatgctgggccgtgatttattacgaaagcagaaattaagcttttgctttcgctacagtcaccatcgccgcacgaatcgtacgaccgttcagcgtataacctttctgcataatgcccagtacgttacctggcgcaacgtcatcagattccaccattgcgatggcctgatgcacatttgggtccagtgggacgttggtttcggcgatcacttcaacgccaaacttacgcacaacatccagcatcgacttcagcgtcagctcaataccttcaaccatcgcggacatatccgggttagctttatcagccacttccagcgcacgatccaggctatcaatcaccggcagcaattcgttgatgaatttctccagcgcgaatttgtgggctttttcgatatccagttcagtacgacgacgcaggttttccatttcggcttttacgcgcaaaatgccgtcacgttcacgggtctgggcttcagccagctgagcttcgagattcgcaattttttcatcgcgcggatccacctgctcagcagaagcttctggctcaactgcctcaatctcttcgtgctgatccatgataatttcttccggggcttgcccctcaggcgttttctgttctttactactcatgaatttctccgcgtttttttcgcattcatctcgctaacttcgcttattatggggatcagtttcagggtttcaagggaagcactcacattgtcatcaatcttcgcaacaaggacctcggaaaaatgaataatcatttcaagtgtattggcattgtgggacacccacggcaccccactgcactgacaacacatgaaatgctctaccgctggctgtgcacaaaaggttacgaggtcatcgttgagcaacaaatcgctcacgaactgcaactgaagaatgtgaaaactggcacgctcgcggagattgggcaacaggctgatctcgcggttgtcgttggcggcgacggtaatatgctgggcgcggcgcgcacgctcgcccgctacgatattaaagttattggaatcaaccgtggcaacctgggtttcctgactgaccttgatcccgataacgcccagcaacaattagccgatgtgctggaaggccactacatcagcgagaaacgttttttgctggaagcgcaagtctgtcagcaagattgccagaaacgcatcagcacggcgattaacgaagtggtacttcatcctggcaaagtagcgcatatgattgagttcgaagtgtatatcgacgagatctttgcgttttcgcagcgttccgatggactgattatttcgacgccaacaggctccaccgcatattccctctctgcgggcggtcctattctgacaccctctctggatgcgattaccctggtgcccatgttcccgcatacgttgtcagcacgaccactggtcataaacagcagcagcacgatccgtctgcgtttttcgcatcgccgtaacgacctggaaatcagttgcgacagccagatagcacttccgattcaggaaggtgaagatgtcctgattcgtcgctgtgattaccatctgaatctgattcatccgaaagattacagttatttcaatacattaagcaccaagctcggctggtcaaaaaaattattctaattttacgccagcctctttactgtatataaaaccagtttatactgtacacaataacagtaatggtttttcatacaggaaaacaactatgttggcacaactgaccatcagcaactttgctatcgttcgtgagcttgagattgattttcatagcggcatgaccgtaataactggcgagaccggcgcgggtaaatctattgcaatagatgccctcggcctttgtctcggtggtcgcgctgaagccgacatggtgcgtaccggcgctgctcgtgccgacctgtgcgcccgtttttctctgaaagatacgccagcggccctgcgttggctggaagaaaaccagcttgaagacgggcatgaatgtttgcttcgtcgcgtaatcagcagcgatggtcgctcccgtggtttcatcaacggtacagctgttcctctgtcacaactgcgcgaactgggtcagttgctgattcagatccatggtcagcacgctcatcagttactcaccaaacccgagcaccaaaaattcctgcttgatggctatgccaatgaaacctctcagctccaggaaatgaccgcacgttatcagttgtggcatcaaagctgccgtgacctcgcgcatcatcagcagttaagtcaggaacgcgccgcccgtgcggagctgctgcaataccaattaaaagaacttaacgaatttaatccgcagcctggagagtttgagcaaatcgacgaagagtacaaacgtctggcgaacagcggtcaattgctgaccaccagccagaatgcattggcattaatggctgacggtgaagacgcaaatctgcaaagtcaactttacacggctaaacaactggtgagcgaattgattggcatggacagcaaactgtccggcgtacttgatatgctggaagaggctaccatccagattgctgaagccagtgatgaactacgccactactgcgatcgtctggatctcgatcccaaccgactgtttgaacttgaacagcgcatctcaaaacagatttcgctggcacgtaaacatcacgtcagccctgaggcattgccacagtattaccagtcgctactggaagaacagcagcaactggacgatcaggccgactcacaagaaacgctcgcgctggcggtaacgaaacatcatcagcaggcactggaaacggcgcgcgcgttacaccagcaacgccagcattatgcaaatgagttggcacagctgatcaccgatagtatgcatgcactctctatgccacatgggcagtttacgatcgatgttaaatttgacgagcatcacctgggcgctgacggcgctgatcgtattgagtttcgggtaaccaccaacccaggtcagccaatgcagcctattgccaaagtcgcatccggtggtgagttgtcccgcatcgcattggcaatccaggtcattaccgcgcgtaaaatggaaaccccggcactgatttttgatgaagtggatgtagggattagcggcccaacagcggcagttgtcggcaaactgctacgtcaacttggcgaatcaactcaggtgatgtgtgttacccacctgccacaagtcgcgggatgtggtcatcaacactattttgtcagcaaagaaaccgatggtgcgatgacagaaacgcatatgcaatccctggataaaaaagcgcggttacaagagttggcgcgcctgcttggtggcagtgaagtcacacgtaacacactggcgaatgcgaaagaactgcttgcggcgtaaacttttttcctgcttcacggtcagagtaaacagcaaaacgccgtaagaccggaaagcaaaaggttttaaagtgatgaaaggtctattatcatcggcatattacagatgagccacgtactgctcgggcccgaaaaggaatcaaatcactatgcgctgtaaaacgctgactgctgcagcagcagtactattgatgttgaccgcaggctgttccactctggagcgagtggtttaccgtcctgacatcaaccaggggaactatctgaccgctaacgacgtatccaaaatacgtgttggcatgacgcaacaacaagttgcgtacgcattgggtacaccgctgatgtccgatccatttggtacaaatacctggttctatgtcttccgccagcaacctggtcatgaaggtgtaacgcagcaaacgctgacgctgacctttaacagtagcggtgtgttgaccaacattgataacaaacctgcgctgagtggtaactaataataaagttgctctcaaagacgttaaaaaaggtgctcaatgagcaccttttttctgtctgttatttattcgctgatttttctgctcgttgcctgcgaagctctttcggatcggcaatgagaggacgataaatctccacccgatcgccatcatgcacaatatcgctgagttttgccggacggctgtaaatgccgactttgtttttagttaaatcgatatcggtacgcaattccagcaaaccactggcgcgaatagcttcttcaaccgtcgcgccctcctgcaacgtcacgcgctgcaggtactgcttctcaggtagcgcataagccacctcaacggcaattttacctggcactgtagacctcttttgcacgaacagtaaaagcctgcaccatattagctgccagctctttaaacacacgaccaaaggcgagttcaatcaacttattggtaaactcaaagtcgagatgaaactcaatacggcacgcgtcctggctcaacggcgtaaacttccaaccgccgatcaatttcttaaacggtccatcaaccagactcatgagaatactttgattactggtcaactggttgcgggttgtaaacgttttgctgatcccagccttagacacatctaccgcagcagtcatctgcccaggagtggactccagaatccgacttccggtacaacccggcaaaaactgaggataagactgaacgtcattcactaactgatacatttgctccgcgctgtagggcaccagtgcggtccgactaatctgaggcataacaatttccatcaacaaaaatccaacaaataatatcatttatcctgctgtaaaaaaaacgctatcccggcgctgggtaacatcgggttcatgctaagatagagccttgtcccccgcaggattgatatggggtgttttcgatttcagattaccgatgattcacgacgcttatgacgaagaaaaaagcacataaacctggttcagcgaccatcgcgcttaacaagcgcgcccgtcacgaatactttatcgaagaagagttcgaagcgggacttgccctgcaaggctgggaggttaaatccctgcgcgcaggaaaagccaatatcagcgacagctatgtccttctgcgcgacggagaggcatttctgtttggcgctaacatcacgccaatggctgtggcctccacgcatgtggtgtgcgatcctacccgtacccgcaagttacttctcaaccagcgcgaactggactcattgtacggtcgcgtcaatcgagaaggctataccgtagtggcgctctccctgtactggaaaaatgcctggtgcaaagtgaaaatcggcgtcgccaaaggtaagaaacagcacgataaacgttcagatatcaaagaacgcgaatggcaggtggataaagcgcgtatcatgaaaaatgcccaccgttaaacctatataagcgatactaatcaaatcctcaccgcgcctccctatccggtggcgcgaatgaacatcttatcgactgtcaaatctgacacagatgtagccatcccattgcttaatcgaaaaaaaatcatactatgcaggcgctaattccaggatgataacgccttttgggctagtcatgctgctcataaatctggtatacttaccgttacacattggggctgattctggattcgacgggatttgcgaaacccaaggtgcatgccgaggggcggttggcctcgtaaaaagccgcaaaaaatagtcgcaaacgacgaaaactacgctttagcagcttaataacctgcttagagccctctctccctagcctccgctcttaggacggggatcaagagaggtcaaacccaaaagagatcgcgtggaagccctgcctggggttgaagcgttaaaacttaatcaggctagtttgttagtggcgtgtccgtccgcagctggcaagcgaatgtaaagactgactaagcatgtagtaccgaggatgtaggaatttcggacgcgggttcaactcccgccagctccaccaatcatgattggacggtgtaaggactacaccaacaaaaacaggaagttataagtctcagcaggacgacaaaaaaggatgacaaaaaaggatatcctccggttgcaaaatggaatttcgccgcagcggcctgaatggctgtaccgcctgacgcggatgcgccgccaccaacagccccgccaatggcgctgccgatactcccgacaatccccaccattgcctgcttaagcagaatttctgtcatcatggacagcacggaacgggtgaagctgcgccagttgggccttttcacggtcatcccagtaacgcgcccgcgcttcatcgttaacaaaataatcatccttgcgcagattccagatgtcgtccgctttcttaaacgcagcctctgccttaatcagcatctcctgagcggtatcaggacgaccaatatccagcaccgcatcccacatggatttgaatgcccgtgctgtcctgtctgcccaggtttccagcgtgcccatgttctctttcaggcgagacttaaatcaacgaccagatcgcctaccggttcagccataccggactcctcctgcgatcccttctgatactgtcatcagcattacgtcatcctccgcccgccatatccggggaagcggggataacttcatttccgtccggggcaaagcggacgcctccggcaagccctgccgctttctgcatcagcacatcatcttccggttgctgtctgactccgcctgttctgcctgctgtttcatcagggcgagatgctcaatacgctgcagggctgacagttcagaaagcgtgacggtcacgccgttatgttcaaatgattcggttttcaggaacatcgctgactctccggattaagatacgaccggaatgttgaccttgcctgcagcaacgccgttcacggtgatggtcataccactgaccgacacggtggcttttgttttatccgccgtcaccgtactgcgatcttctgccattgacggacggcccacattggtgaccttcaccgtacgggtgatcacttccttcgccgtcaccgccttaccgatactgctgacccagccacggaacacatcgaccgtgccgttcgggaagcggattttataggcacgggtatcaccttcattaaaccacgccagcagcgcctgctgcccctgctctccgggcatccacgccagcgtgaagctggtatctccggcggatttctgcccctgcccggtcgcggtccagtccgcatcttcatcatcgagataactgtcgtcataggactcagcggtcagttcgccgggcgttaggtctttaatttttgccagacgcgaccagtcattgtctgaaagcgggtttgcataagggtcgccgctcccgttataaacccacagtgtggttccggcccctttcaccggtgccagaggatttggtgttggcatatcgtcctcacatttcataggtaatgacataagtcagatcggctgaactccacaggcccgcatcatcgtcgcgccggtagtcatagccactggccaccatactggtgatcaaatctgacagtgccgggatatcgctcatcgccggataaatccgtcacgcatgttctgcatgatgatgcgacggcggcggtaagccgggtccgccagattctgcggatcttcatccggcaggcgacgcagggtcatctgctcagaggtggagccgccacgggaacggataacctcaccggaaacaatcggcagcagcgcactgagatccagctgccagcgggaaatactgatgcgcagcgccgccagcgcataaacgaagcagtcgagtgcctcattgcgtcgctttttgctgtcccacagtatttttttcctgccatccacccatttttcgacctgctcttcagcagtcagctgctgcgcttcggtcagatcaaaaatatccgggttattcgggaagtgaacggcaccgggaagcggttcatccccttccggcgtcagtgtgaagcggttataaatctgctctttcgcggtatccgtaccgatttcggtaaggtaaactgttttgattttactgacggatccccaccagattctgacgggtcaaaacccgcttttttgctggatttcgacgcctcaaattttgacgggtcggattttgatgcatcagattttgatgggtcagactctgacgggaactccgtagtgatctctgaaccagcggttaacttggacgcgggttcaactcccgccagctccaccaatcatgattggacggtgtaaggactacaccaacaaaaacaggaagttataagtctcagcaggacaccgaccagacggtgaggagacaaaaaaggatacgcaacggagtcgcgactccctatgacattaaagcccgctgatgcgggcttttttattggtcctgacccgccctgaatagaattcatccaattacagtccagacatatacagtatccctcagctcagtatcagcttctcgacaaatggtcactgttatttacccgttgccagaaagagaataatttgcccccatagccagccttcctggaatctgtatattcattaatattgttatcgattccatcaagtaacataggttggatgcgattgatcttactcacattagtcgacacggaactcagtaagttgaactctgaaaaagcagtttaaatagcatttaaacaaatgccaccagttcgaaaaagagtataagcacacttaatatattgttttaattattcatttcctttcaacccaattcttatccctcacattatttgttattaatttgttgtttttgatcacaataagaaaacaatatgtaacttttatgcgcatttttcagaaatgtagatatttttagattatggctacgaaatgagcatcgccatgtcaccctacatctcataagaggatcgcttctgatgaatgcactgaccgccgtacaaaataacgctgtcgattcaggccaggactatagcggattcactctcatcccgtcggcgcaatccccgcgtctgctggaactcaccttcaccgaacagacgaccaaacagtttctcgaacaggttgccgagtggcccgtgcaggcgctggagtacaaatcgtttctgcgttttcgggtaggcaaaattctcgacgatctgtgtgcgaatcagctgcaaccgctgctgttgaagaccctgttaaaccgcgctgaaggtgcgctgttgatcaatgcggtgggtatcgatgatgtcgcgcaggcggatgagatggtgaagctggcgacggcggtggcgcatctgattggtcgctccaatttcgatgcgatgagcggtcagtattacgcgcgtttcgtggtgaaaaatgttgataactcagacagctatctgcgtcagccacaccgcgtgatggagttgcacaacgacggcacctacgtggaagagatcactgattacgtgctgatgatgaaaatcgacgagcagaacatgcagggcggtaactcgctgctgctgcatctcgatgactgggaacatctggaccactttttccgccatccgctggcgcgccgtccgatgcgctttgccgcgccgccgagcaaaaacgtcagcaaagatgtcttccatccggtgttcgatgtcgatcagcagggccgcccggtgatgcgctatatcgaccagtttgtccagccgaaagacttcgaagaaggcgtgtggttgagcgagctttccgatgccattgaaaccagtaaaggcattctttctgtacccgttcccgttggcaaattcctgttgattaacaacctgttctggctgcacggtcgcgaccgctttactccgcacccggatctgcgccgtgaactgatgcgtcagcgtggctatttcgcttacgccactcaccactaccagacgcatcagtaagcgcaaaggaattgagcggatgtatgattttgtgattattggcggcggcatcatcggcatgtcgaccgccatgcaactgattgatgtttatccggatgcccgcattgcgttgctggaaaaagagtccggcccggcctgtcaccagacgggccacaacagcggcgtgatccatgctggggtctattacacgcccggcagcctgaaggcgcagttctgcctggcgggaaaccgcgccaccaaagccttttgcgatcaaaacggcattcgctatgacaactgcggcaagatgctggtcgccacctctgaactcgaaatggaacggatgcgcgcgttgtgggaacgcacggcggcgaacggaatcgatcgcgagtggttaaacgccgaggaactgcgcgagcgcgaaccaaatatcaccgggctgggcggtatttttgtgccgtccagcggcattgtcagctaccgcgaagtgacggcggcaatggcaaaaatttttcaggccagaggcggtgagattatctataacgccgaagtcagcgccctcagtgagcataaaaacggcgtggtgatatgtacccgtcagggcggtgaatatgaagcatcgacgctgattagctgttccgggctgatggctgaccggctggtgaaaatgctcggcctcgaaccgggctttattatctgcccgttccgcggcgagtatttccgccttgcgccggagcataaccagattgttaaccacctgatttaccccattcccgacccggcaatgccgtttttgggcgtgcatctcacccgcatgatcgacggcagtgtgaccgtcgggccaaacgcggtgctggctttcaaacgcgaaggctatcgtaagcgcgacttctcatttagcgacacgctggaaattttgggctcgtcggggattcgccgggtgctgcaaaaccatctacgctcaggactgggcgagatgaaaaactcgctgtgcaaaagcggctatctgcggctggtgcaaaagtattgtccccggctttcgttaagcgatctccagccctggcccgccggtgtgcgggcgcaggcggtatcgccggacggcaagctgattgacgattttctgtttgtcaccaccccgcgcacgatccacacctgtaatgcgccctccccggcagcgacatcagcaattcctattggtgcgcatattgtcagcaaggtacaaacgctgttggcaagccagagtaaccccggacgcacgctgcgagcggcacgtagtgtggatgccttacacgccgcatttaatcaataacctttgaaaacaggatgtagcgatgaaacttaacgacagtaacttattccgccagcaggcgttgattaacggggaatggctggacgccaacaatggcgaggtcatcgacgtcaccaatccggcgaacggcgacaagctgggtagcgtgccgaaaatgggcgctgatgaaacccgcgccgctatcgacgccgccaaccgcgccctgcccgtctggcgtgcgctcactgccaaagaacgcgccaacattctgcgcaactggttcaatttaatgatggagcatcaggacgatttagcgcgcctgatgaccctcgaacagggcaaaccactggctgaagcgaaaggcgaaatcagctacgccgcctcatttattgagtggtttgcagaagaaggcaaacgtatttatggcgacaccattcccggtcatcaggccgataaacgcctgattgttatcaagcagccgattggcgtcaccgcggctatcacgccgtggaacttcccggcggcgatgattacccgtaaagccggtccggcactggcggcaggctgcacgatggtgctgaagcccgccagtcagacgccgttctctgcgctggcgctggcagaactggcgattcgcgcgggcgttccggctggcgtgtttaacgtagtcaccggttcggcgggcgcggtcggtaacgaactgaccagcaacccgctggtgcgcaagctgtcgtttaccggctcgaccgaaattggccgtcagttaatggaacagtgcgcgaaagacatcaaaaaagtgtcgctggagctgggcggcaacgcaccgtttattgtctttgacgatgccgatctcgataaagccgtggaaggcgcgctggcctcgaaattccgtaacgccgggcaaacctgcgtctgcgccaaccgcctgtatgtgcagaacggcgtgtatgaccgctttgccgaaaaattgcagcaggcggtgagcaaactgcacatcggcaacgggctggagaaaggcgtcaccatcgggccgctgatcgatgaaaaagcggtagcaaaagtggaagagcatattgccgatgcgctggagaaaggcgcgcgcgtggtttgcggcggtaaagcacatgaacgcggcggtaacttcttccagccgaccattctggtggacgttccggctaacgccaaagtgtcgaaagaagagacgtttggccccctcgccccgctgttccgttttaaagatgaagccgatgtgattgcgcaagccaatgacaccgaatttggccttgcagcctatttctacgcccgtgatttaagccgcgtcttccgcgtgggcgaagcactggagtacggcatcatcggcatcaacaccggcattatttccaatgaagtggccccgtttggcggcattaaagcctcgggtctgggtcgtgaaggttcgaagtatggcatcgaagattacttagaaatcaaatatatgtgcatcggtctttaactggagaatgcgaatgagcagcaataaagagttaatgcagcgccgcagtcaggcgattccccgtggcgttgggcaaattcacccgattttcgctgaccgcgcggaaaactgccgggtgtgggacgttgaaggccgtgagtatcttgatttcgcgggcgggattgcggtgctcaataccgggcacctgcatccgaaagtggttgcggcggtggaagcgcagttgaaaaaactgtcgcacacctgcttccaggtgctggcttacgagccgtatcttgaactgtgcgagattatgaatcagaaggtgccgggcgattttgccaagaaaactctgctggttacgaccggttccgaagcggtggaaaatgcggtgaaaatcgcccgcgccgccaccaaacgtagcgggaccatcgcctttagcggtgcgtatcacgggcgcacgcattacacgctggcgctgaccggcaaggtgaatccgtactctgcgggcatggggctgatgccgggtcatgtttatcgcgcgctttatccttgcccgctgcacggcataagcgaggatgacgctatcgccagcatccaccggatcttcaaaaatgacgccgcgccggaagatatcgccgccatcgtgattgagcccgttcagggcgaaggcggtttctacgccgcgacgccagcctttatgcagcgtttacgcgcgctgtgtgacgagcatgggatcatgctgattgccgatgaagtgcagagcggcgcagggcgtaccggcacgctgtttgcgatggagcaaatgggcgtggcaccagatctcaccacctttgcgaaatcgatcgcaggcggtttcccgctggcgggcgtcaccgggcgcgcggaagtgatggacgccgtcgcaccgggcggactgggtggcacctatgccggtaacccgattgcctgcgtagcggcgctggaagtgttgaaggtgttcgagcaggaaaatctgctgcaaaaagccaacgttctggggcagaagctgaaagacggattgctggcgatcgccgaaaaacacccggagatcggcgacgtacgcgggctgggggcgatgatcgccatcgagctgtttgaagatggcgaacacagcaaaccggacgtaaaactcaccgccgagatcgtggcacgcgcccgcgataagggtctgattcttctctcctgcggcccgtattacaacgtgctgcgcatccttgtaccgctcaccattgaagacgctcagatccgtcagggtctggaaatcatcagccagtgttttgctgaggcgaagcagtagtaccgcaccatgccggaggcgacgctgcgcgtcttgtccggactacgagaatccaggtcggataaggcgtttacgccgcatccgacaatctgtacgtgaacaggaataaatctatgtcggccggataaggcggagccgctctccggcaaaaagaaccaataacaattaaacgcgtgacccgacgcgggaaatgtcggggcgctctcccaagtgacacactttcgagaggattcaggatggggcaatcatcgcaaccacatgagttaggcggcgggctgaagtcacgccacgtcaccatgttgtctattgccggtgttatcggcgcaagtctgtttgtcggttccagcgtcgccatcgccgaagcgggcccggcggtattactggcctatctgttcgccggattactggtggttatgattatgcggatgttggcggaaatggcggttgccacgcccgataccggttcattttccacctatgccgataaagccattggccgctgggcgggctataccatcggctggttgtactggtggttttgggtactggttatcccacttgaagccaacatcgccgccatgatcctgcactcgtgggttccaggcattcccatctggttattttccctcgtcattaccctcgccttaaccggcagtaatttattaagcgttaaaaactacggcgaatttgagttctggctggcgctgtgtaaagtcatcgctatcctggcctttattttccttggtgccgtcgcaattagcggtttttacccgtatgccgacgtgagcggtatttcaagattgtgggatagcggcggctttatgcccaacggcttcggtgcggtattaagcgcgatgttgatcaccatgttctcgtttatgggcgcagaaattgtcaccattgccgccgcggaatccgacacgccggaaaaacatattgtccgcgccaccaactcggttatctggcgtatctctattttctatttgtgttctatttttgtcgttgtggcattaatcccgtggaatatgccagggctgaaagccgttggttcttatcgctcggttctggaattgctcaatattcctcatgcgaaattaatcatggactgcgtgatattactttccgtaaccagctgcctgaactcggcgctgtataccgcttccaggatgctctactccttaagccgtcgcggtgatgctcccgcggtaatgggtaaaatcaaccgcagtaaaaccccgtacgtggcggtgttactctccaccggcgcggcattcttaacggtggtggtgaactattacgcgcctgcgaaggtgtttaaatttctgatcgacagctccggcgctatcgccctgctggtttatttagtcatcgccgtttcacaattgcggatgcgcaaaattctgcgagcagaaggaagcgaaattcgcctgcggatgtggctttatccgtggctcacctggctggtcatcggctttattacctttgtgttggtagtgatgctattccgcccggcgcaacagttagaagtgatctccaccggcttattagcgattgggattatctgtaccgtgccaattatggctcgctggaaaaagctgataatgtggcaaaaaacacccattcataatacgcgctgataatgctcaggagtcacaccatgaccattacctctctggatggctatcgctggctgaagaacgatattattcgcggcaattttcagccggatgaaaaattacggatgagtttgctgacatcgcgttatgcacttggcgtcggaccgttgcgggaagcgctttcgcaactggtggcagaacgactggtcacggtggtgaatcaaaaagggtatcgggtggcgtctatgtcagagcaggagctgctcgatattttcgacgcccgcgccaatatggaagcgatgctggtgagtctggcgattgcccgcggtggcgatgaatgggaggcagacgttctcgcaaaagcgcatctgctcagtaagcttgaggcctgtgacgccagtgagaaaatgcttgatgagtgggatctgcgtcatcaggcgtttcatactgcaattgtggcgggctgtggttcttactatttgctgcaaatgcgtgaacggttgtttgatctggcagcgcgttatcgatttatctggctgcggcgaacagtgctttcggtggaaatgctggaagataaacacgatcagcaccagaccctgactgcggcggtactggcgcgagataccgcgcgcgccagtgagttaatgcgccagcatttactgacgccaattcccattatccagcaggcgatggctggcaattaactactcttcaggaatacgcaacacttgccccgggtaaattttatccgggctttttagcatcggtttattcgcttcgaagattttattgtacagattagcgttaccgtagacctgtttggaaatggcactcagagtgtcgccagacttaacggtataaaactggctggcagtggctggtgtcgccgttttcacctgatcatcgacactggcaataccggaaatattccccaccgcaacaaggattttctccttcgcctcctgacttaagccgtcaccagtgaccgtcgctttgccgtcggcaatttgaatgttcactttatcggcatcaggtataccggttttgttcagatgctcctgcaccttcttcgcctgatcgtctttatcgtgctgacctgtaaccgcgtcccagagtttttctccggcatctttcacaaaattgaacagacccatagctacctcattcgttaacggaaacactcagaaagtgtagcagaggaacgcggcgcgttaacgccgcggggatgagcacaggtttaatcgcgggtttgcacccagaacgcgtgaatcaaaccggggatatacccaagcagtgtcagcagaatattaataatgaacgcccaaccgaaccctttaccgagcagcacgccgagcggcggcagaatgatggtgatgacgattctccagaaacccatatgtactccctataagaaaattactcattgtttaaaaagagattttatctcttaagcgtagtaattttagcggagcctgccagtttcagcgtacgcttttactctcatttacgctgctgatgctggtatatgttgcacacttagtttagagtttacttaatttagataatacttaaataactatgactgaactcgcacaattacaggccagtgccgaacaggcagcggccttattgaaatcaatgagccaccctaaacgattgctgattctgtgtatgcttagcggttcccccggcaccagcgcgggagagctgacgcgcattaccggactgagtgcctctgcgacatcacagcatctcgctcgtatgcggggcgaagggcttatcgacagccaacgggatgcccaacgcattctatattccattaaaaatgaggcggtaaatgccattatcgccaccctgaaaaatgtctattgtctgtaaggagtcactatggctttgacaaccatttcgccgcatgatgcacaagaattaatcgcacgcggcgcaaagttaatcgatattcgtgatgctgatgaatatcttcgtgaacatattcctgaagcagatctggctccattatccgtactggaacagtcaggtcttccgcctaaattacgtcgcgagcaaattatattccactgccaggcaggtaaacgcaccagtaataacgccgataaattagcagcgattgccgcccccgcagaaatctttttactcgaagatgggattgatggctggaaaaaagcaggattgccagtagcggtaaataaatcccaacccttgccgttaatgcgccaggtgcagatcgccgcgggtggtttaatattaatcggcgttgtactgggttataccgtaaatagcgttttcttcttattaagcggctttgttggtgctgggttactgtttgcaggaattagtggtttttgtggaatggcaagattgttagataagatgccgtggaaccaacgagcttgagaagcgacgccggacgcgccatagcagcggcatccggcctcagtaattagatcaggaaatcgtcgagagatttaccttctgccagcgcctgagcgattggcttcggtgtacggccctgaccggtccaggttttagtttcaccgttaacatcgatgaatttatatttcgccggacgcggctggcgttttttaccagcgcgtggtgccgcagcagagctattacccaataactcttccgggttaattccgtcagctttcatcagctccagccaggtgctaattttttcctggcgctctgccagttcacgctgctgttgttcttcttcttcacgtctttctttagtgacaaccctgaatttttcgagcatttcttcaagaacgtcaatggagaattcgcgagccatcgcacggagggtgcgaatgttatttaaactttgtaacattacggacataataaagaaaaccttttaacccaaaacaaaaaagtatttcgtcgcgtagtgtaagcgatcacttattatatttccacaaaatttaatctatttacagtcctgcacgagattatttcagctgttattttctgaaactctcagaataatttcaagattatatattagccattttgatgagtaatttcggttattggtgaacagagcggcgctctctgctcgataattccgcaagcctgacaaaaccaaagtgaataaaaatgcaactcaacagaataaaagaaaacatcactcactggtgctttctgctgtcaatgtacattatctggcataaaaaatgctgaaaatgacccggtcactacatacaccgaattctctacgcttatagcgttacctcccccccaaaccttcatgagtgaaaataaaggtaaacacatatccaattgatttaattaaaaataaatcataccggcatgtaaaaatccacaatgtacaaaaaacgcgccgttacggaatattttatctacaaaaacagattaaataaaaatttttcactaattgattagtcatagccagcgatatacgctatgcgaaaatgcagatggcaatgagatccgctgctttcatctccattaacatcccattacgcttttattaaggagcattagcatgttctcaccgcagtcacgcttgcgtcatgcagttgcagatacgttcgcgatggttgtttactgttctgtcgtgaacatgtgtattgaagttttcctctccggaatgagcttcgaacagtctttttattccagattagtagcgattccggtgaacatcttaattgcatggccatacggtatgtaccgcgatctgtttatgcgcgcggcacgcaaagttagcccgtcgggctggataaaaaatctggcggatatcctggcttatgtgacgttccagtcaccggtgtatgtggcgatcttgttagtggtgggcgcagactggcatcagattatggcggcagtcagttcaaacatcgttgtttcgatgttgatgggggcggtttatggctacttcctcgattattgccgccgactgtttaaagtcagccgttaccagcaggtaaaagcctgacccttcttttcgcgactggcatcgccagtcgcgtctttaactggcttcgccaaataaaccattcaaataacgttcaagcgcaacacgcgaactaaagccatgcgggataccgtaatgctcatgacgttcacccgctaaatagagcggaaattgctggtaatgatcgcaagttttaatatcggaagcgggttcagccagtgttgaactacgttcttttaatgttggatgaatcaccagggcggtacgtcccattcgcgcttcgcgattaacatagacataattttccccacggcggtaaccatacgctttctgggttaccacatcgacagtaaaaccgactttttcaagtacgcgcgccacctcgtctggtcgtaaatacatatttgatcctcgttattatcaaccgcgggcctaccttacctgattgcgcattcacaacgctttcagaaaagtccataaagccgcgatgaacctcagttaagaaaattatggtctacactgaaaattacatcgaattctaatgggggatcatatgtttaaccgaccgaaccgcaacgacgttgatgatggcgtgcaggatatccagaatgatgtcaatcaattagctgacagtctcgaatctgtattgaagtcctggggcagcgacgccaaaggggaagccgaagccgctcgtagtaaagcgcaggctctactgaaagaaaccagggcgcggatgcatggtcgtactcgcgtccagcaagccgcgcgcgatgccgttggctgcgcggattcttttgttcgtgaaagaccctggtgtagtgtgggtacagcggcagcggtgggtatttttatcggcgcactgttaagcatgcgcaaatcgtagtgcaaaaatgataataaatacgcgtctttgaccccgaagcctggcttcggggttttttagcttaaggctttacgtaattgttgtgctacctgtcgcgccataccttcgttaacaatattagtaaacgaaagcagtaatccaccttccccacttgaacggatacgccagtcgctaagtgcctgcaccgcaaggcctgcagcattggctttacgcgcatgggcaatatcatcgcctatcattctgatcaccatctggataccacctttctgcggcacaacctgaaatccttgctgcgtcaacgcttgctcaatccattgccgacgttgagcataatgctgacgcattttcttcagatgccgccagaaatgcccctcgcgaagaaagtctgccagtgtgttctgccatagaacaggtaccgcacatggagccagtgacgcctggtggcggaattgtgcaatttgcttcaccggcaccaccagccacgcacagcgcaatgcaggaaatagcgctttgctgaatgttccggcataaattacccgctgcggtgcgtcgagactttttaacgccggtaacggcttaccgtgatagcgaaactcactgtcataatcatcttcaataatccatgcctgactacgatctgcccattccagtatctgatgcctgcgcgctaaagagagcgccacacccagcggactttggtgtgctggtgttatcagggcaaaacgcgcatcaggataattttgtattccgcttgtgatatccagtccattgtcatcaaccggcacaggcaaaatttccacatcatggcgagtgacaatcgggcgaatcagtggaaagccgggatcttctatccacatcccgtttcccggtttcgccagcgcgtgcagaattaaagctattgaggccgcataaccgtgagtgataaagacctgctctggctgacaatcaatcccacgtgaaatgcgtaagtaatcaactattgcctcgcgcaacgccacctcaccgcaaacatcgcctaacgccaaatcaaagcgcgtctgggtacgaaggcgacgccccatcacccgcgcccacagctctcgcggaaagagatcgagtgcgggtaatcccatttgaaatggcaacggttgctgactttcaccggcaaaatctacaacttgtacagtagattgttgcggatatatccgctcactgacaaatgtgccagcctgtccccgcctgatcagccatccttgcgccaccagctcagcatacgcattttcgacagtggatcgagacacccccagctcctgcgaccaggtacgacttgaaggcagccttgcgccgggtttcagttccccttgctcaatagccgtttttaactgacgggcgatatcctgatagcgcggcatatggtctgcttttttaggtaatttatggctctctttagcagtccattatagtgctacattgcgggcgttaataagaggagaaactgtatgactacattacgtcagccttactacgaacttagcccggcagtgtataacgcactagtgcaggccaaaacggcactggaaaatagcacgctggataccacgttgatggagttagtttatttgcgcgtctcgcaaatcaacggctgcgcattttgtctggagatgcacagcaaagcattgcgcaaatccggcgtgccacagcacaaactggacgccctggcaggttggcgcgtaagccatcattttgatgaacgcgagcgggcggcgctggcatgggcggaatcggtaaccgaaattgccagaacccatgcggaagacgaggtttatcagcctttgcttgagcatttcagcgcagcagagatcagcgacttaacgtttgccatcgggctgatgaattgttttaaccgtctggccgtttccatgcggatgtaacttcttgatgccgggtatttgcccggcaaaaaacacaaaatcccctaccccgttgagccattcatcggtggcgtaatcaatctaaaattcccatatcttgtgtggttgaatcttttttcaactacatctagtatctctgtatcaacagagatacaacccgacgcgtatcatcgcgccgtatcttcattttaaacggaaatacgaatcatgcgcattactatttacactcgtaacgattgcgttcagtgccacgccactaaacgggcgatggaaaaccggggctttgattttgaaatgattaatgtcgatcgcgttcctgaagcggcagaagcgctgcgtgctcagggctttcgtcagttgccggttgtgattgcaggcgatcttagctggtctggtttccgcccggacatgatcaatcgtctgcatccagcgccacacgcggccagtgcatgagccagctcgtctacttttccagcagctccgaaaatacgcagcgttttatcgaacgtttagggctgcccgcggtgcgcatcccgctcaatgagcgggaacggattcaggtagacgagccttacatcctgatcgtgccctcttacggcggcggcggtacggctggcgcggtgccacgacaggtcattcgctttttaaacgacgagcataaccgggcgttgctgcgcggcgttattgcttcgggtaatcgcaactttggtgaggcatatggccgcgccggagatgtgattgcccggaaatgcggcgtgccgtggctgtaccgctttgaactcatgggtacgcaaagcgatatcgaaaacgttcgtaaaggagtaaccgaattttggcaacgacaaccgcagaacgcctgacgcaggaaacgatggattatcacgctctgaatgcgatgcttaacctttacgatagcgcaggtcgcattcagttcgataaagatcgccaggcagtagacgcctttatgacgacgcatgtgcgtccgaacagtgtggccttcagtagccagcagcagcgcctgaactggctggttaacgaaggttactatgatgaaagcgtccttaatcgctactctcgcgattttgtcattacgctgtttgcccacgcgcacgccagcggttttcgtttccagacattcctcggagcatggaagttttacaccagctatacgttgaagacattcgacggtaagcgttatctggaagattttgccgatcgcgtcacgatggtggcgctgacgctggcacaaggcgatgaaacactggcgacgcagctcactgatgagatgctgtcaggacgctttcagccagccacgccaacattcctcaactgcggtaagcagcagcgcggcgaactggtttcctgttttctgctgcgtattgaagacaatatggagtcgattggccgggcagtgaattccgcactacaactgtcgaaacgcggcggcggcgtagcatttttgctgtcgaatctgcgggaagcgggcgcgccaattaaacgtattgaaaatcaatcttctggcgtgattccggtgatgaaaatgctggaagacgcattttcttatgccaaccagctcggcgcgcgtcagggtgctggcgcagtctatttacatgcccatcatcccgatattctgcgttttctcgatacaaagcgggaaaatgccgacgagaaaatccgcattaaaacactgtcgctgggcgtggtgatcccggatatcactttccatctggcaaaagagaatgcgcagatggcactgttttcgccttatgacgttgagcgggtttatggcaagccgtttgctgatatcgccatcagtgaacactatgccgaactggttaccgatgaacgcatccgcaaaaaatacatcaacgcccgtgatttcttccagcgactggcagaaatccagtttgagtccggctatccctacatcatgtatgaagacacggtaaaccgtgctaaccctatcgccgggcgcataaatatgagcaatctctgctcagaaattttgcaggttaacagcgcctcagagtatgacgagaatctcgactatgcccgcacaggccatgatatttcctgcaatttaggttcgttgaatattgcccacaccatggattcccccgactttgcccgcacggtagagactgccgtgcgcggtttaacggcggtgtcagatatgagtcatatccgcagcgtgccgtccatcgaagccggaaatgccgcctcacacgccatcggactggggcagatgaatttacacggctatctggcgcgagaaggcatcgcttatggttcgccggaagcactggatttcaccaatctctatttctataccatcacctggcacgcactgcgtacctcgatgttgctggcgcgcgaacgcggtgaaaccttcgccgggttcaaacagtcacgctatgccagtggtgaatatttcagccaatatctgcaagggaactggcagccgaaaactgcgaaagttggcgaactgtttacccgtagcggtattacgttacctacccgtgagatgtgggcgcagctgcgcgacgacgtgatgcgctacggcatttacaaccagaatcttcaggcggtgccgccaaccggttctatctcttatatcaactatgctacgtcgagtattcatccgattgtggcgaaagtagagatacgcaaagagggcaaaacaggacgcgtttactaccctgccccgtttatgactaacgaaaatctggcgctgtatcaggacgcttacgaaatcggcgcagaaaagatcatcgacacctacgcggaagcgactcgccatgtcgatcaggggctgtcgctgacgctgtttttccccgataccgccaccactcgcgatatcaacaaagcgcagatttacgcctggcgcaagggtatcaaaacgctctattacattcgcctgcgtcagatggcgctggaaggcactgaaattgaaggctgcgtctcctgtgcactttaaggaatatctatgaaactctcacgtatcagcgccatcaactggaacaagatatctgacgataaagatctggaggtgtggaatcgcctgaccagcaatttctggctaccagaaaaggtgccactgtcgaacgatattcctgcatggcagacattaagtgtcgtagaacaacaactaacaatgcgcgtttttactggcctgacgctgctcgacacgctgcaaaatgttatcggcgcgccctcgctgatgcccgatgcactcaccccccatgaagaggcgatattatcaaatatcagctttatggaagcggttcatgcccgctcttacagttcaattttctcgacgctgtgccagaccaaagatgtcgatgccgcctacgcctggagtgaagaaaacgcgccgttgcagcgaaaagcacagattattcagcaacattatcgcggtgatgatccgctgaaaaagaaaatcgccagtgtgtttcttgaatcttttttgttctattccggtttctggctgccgatgtatttttccagccgcggaaagctaaccaataccgcagacctgatccgtctgattatccgggatgaagcagtccacggttactacatcggctataaatatcagaaaaacctggaaaagatctcccaggcacgacgtgaagaattgaagagtttcgccttcgatttgttgctggaactctatgacaacgagttgcaatacaccgatgagctgtacgccgaaaccccgtgggctgacgatgtgacagcgtttctctgttacaacgccaataaggcgttgatgaatctgggctacgaaccactatttcccgcaggaatggcggaagtgaatccggcaatcctcgccgcgctttcgccgaatgccgatgaaaatcacgatttcttttccggttcaggctcttcatatgtgatgggaaaagcggtcgaaacagaagatgaggactggaatttctgagggtgttatttttcaaaaatatcactacccgcagcagggaaataattcccgccaaatagctttttatcacgcaaatattttgtggtgatctacactgacactctgttgcattattcgcctgaaaccacaatattcaggcgttttttcgctatctttgacaaaaaatatcaacttttctcgatttgctctcagcccttatatcatgggaaattccggcgatttgctcacatcaatattcatgccacatttgccatcaggggttgcctcagattctcagtatgttagggtagaaaaaagtgactatttccattgggtaatgtatcgacataaacaaataacaggaatctttctattgcatggcaattaaattagaaattaaaaatctttataaaatatttggcgagcatccacagcgagctttcaaatatatcgaacaaggactttcaaaagaacaaattctggaaaaaaccgggctatcgcttggcgtaaaagacgccagtctggccattgaagaaggcgagatatttgtcatcatgggattatccggttcgggtaaatccacaatggtacgccttctcaatcgcctgattgaacccacccgcgggcaagtgctgattgatggtgtggatattgcaaaaatatccgacgccgaactccgtgaggtgcgcagaaaaaagattgcgatggtcttccagtcctttgccttaatgccgcatatgaccgtgctggacaatactgcgttcggtatggaactggccggaattaatgccgaagaacgccgggaaaaggcccttgatgcactgcgtcaggtcgggctggaaaattatgcccacagctacccggatgaactctctggcgggatgcgtcaacgagtgggattagcccgcgcgttagcgattaatccggatatattattaatggacgaagccttctcggcgctcgatccattaattcgcaccgagatgcaggatgagctggtaaaattacaggcgaaacatcagcgcaccattgtctttatttcccacgatctcgatgaagctatgcgtattggtgaccgaattgccattatgcaaaatggtgaagtggtgcaggttggtacaccggatgaaattcttaataatccggcgaatgattatgtccgaaccttcttccgtggcgtcgatattagccaggtgttcagtgcgaaagatattgcccgtcgtacaccgaacggcttaattcgtaaaacccccggcttcggcccgcgttcggcactgaaattattgcaggatgaagatcgcgaatatggctacgtcatcgaacgcggtaataagtttgtcggcgctgtgtctatcgattcgcttaaagccgcgttaacgcagcagcaaggtcttgatgcggcgctgattgatgcgccgttagcggtcgatgcacaaacgcctcttagcgagttgctctctcatgtcggacaggcaccctgtgcggtgcccgtggtcgacgaggaccaacagtatgtcggcatcatttcgaaaggaatgctgctgcgcgctttagatcgtgagggggtaaataatggctgatcaaaataatccgtgggataccacgccagcggcggacagtgctgcacaatccgcagacgcctggggtacaccggcggctgcaccaaccgacggcggtggcgctgactggctgaccagtacgcctgcgccaaacgtcgagcattttaatattctcgatccgttccataaaacgctgatcccgctcgacagttgggtcactgaagggatcgactgggtcgttacccattttcgtcccgtctttcagggcgtgcgcgttccggttgattacatcctcaacggtttccagcaattgctgctgggtatgcccgcgccggtggcgattatcgttttcgctctcatcgcctggcagatttccggggtcggaatgggcgtggcgacgctggtttcgctaattgccatcggcgcaatcggtgcctggtcacaggcaatggttaccctggcgctggtgttaacagccctgctgttctgtatcgtcataggtttgccgttggggatctggctggcgagaagtccgcgagcggcgaaaattattcgtccactgcttgatgccatgcagaccacgcccgcgtttgtttatctggtgccaatcgtcatgctgtttggtatcggcaacgtgccaggcgtggtggtgacgatcatctttgcgctgccgccgattatccgtctgacgattctgggaattaaccaggttccggcggatctgattgaagcctcgcgctcattcggtgccagcccgcgccagatgctgttcaaagttcagttaccgctggcgatgccaaccattatggcgggcgttaaccagacgctgatgctggccctttctatggtggtcatcgcctcgatgattgccgtcggcgggctgggtcagatggtacttcgcggtatcggtcgtctggatatggggcttgccaccgttggcggcgtcgggattgtgatcctcgccattatcctcgaccgcctgacgcaggccgttgggcgcgactcacgcagtcgcggcaatcgtcgctggtacaccactggccctgtcggtctgctgacccgcccattcattaagtaactctgcacttgcccggtgacgccgggcatatcaccctgccaaaaaaaggaataacaatgcgacatagcgtactttttgcgacagcgtttgccacgcttatctctacacaaacttttgctgccgacctgccgggcaaaggcattactgttaatccagttcaaagcaccatcaccgaagaaaccttccagacactgctggtcagtcgtgcgctggagaaattaggttataccgtcaataaacccagcgaagtggattacaacgttggctacacctcgcttgcttccggcgatgcaaccttcaccgcagtgaactggacgccactgcatgacaacatgtacgaagctgccggtggcgataagaaattttatcgtgaaggagtatttgttaacggcgcggcacagggttacctgatcgataagaaaaccgccgaccagtataaaattaccaacatcgcgcaacttaaagatccgaagatcgccaaactgttcgataccaacggcgacggtaaagcggatttaaccggctgtaacccaggctggggctgcgaaggtgcgatcaaccaccagcttgccgcgtatggactgaccaataccgtgacgcataatcaggggaactacgcagcgatgatggctgacaccatcagtcgttacaaagagggtaagccggtgttttactacacctggacgccgtactgggtgagtaacgaactgaaaccggggaaagatgtggtctggttgcaggtgccgttctccgcactgccgggcgataaaaatgccgataccaaactgccgaatggcgcgaattacggcttcccggtcagtaccatgcatatcgttgccaacaaagcctgggccgagaaaaacccggcagcagcgaaactgtttgccattatgcagttaccagtggcagatattaacgcccagaacgccattatgcatgacggcaaagcctcagaaggcgatattcagggccacgttgatggttggatcaaagcccaccagcagcagttcgatggctgggtgaatgaagcgctggcagcgcagaagtaatttttattcgggcggataaggcgtttttgcctcatccgccgctctgtacacaatgcctgatgcgacgctggcgcgtcttatcatacctacaaaccacaccgcacatttcaacaatctatctttcatcccatattcatcaacatccgctattattgatttccagcttaatcatcacctgatgaacaaaaataatgactaaacctaatcatgagcttagcccggcgctgatcgtgctgatgtctatcgccaccggtctggcggtagccagtaactattacgcccagccattgctcgacaccatcgcgcgtaacttttccctttccgccagttcggcaggctttattgttaccgccgcgcagttgggctatgccgcaggtctgctgtttcttgttcccctcggtgatatgtttgaacgccgccgcctgattgtctcgatgaccttactggcagcaggcggcatgttaatcactgccagcagtcagtcgctggcgatgatgatcctcggtacagcattaaccggtttattttcagtcgtggcacaaattctggttccactggcagcgacgctggcttcaccggacaaacgcggcaaagtggttggcaccattatgagcggtctgctattggggatcttactcgcacggaccgttgccggattgctggcgaatctcggcggctggcgcaccgtcttttgggttgcttcgatgttaatggcactgatggcgctggcattatggcgtggtctgccacaaatgaaatcagaaacccacctcaactacccacagttgttgggttccgttttcagcatgtttatcagcaataagatcctgcgcacccgcgcgttgctgggctgcctgacctttgccaacttcagcattctctggacctcaatggcctttttgcttgccgctccaccttttaactacagcgatggtgtaattggtctgtttgggcttgcgggagctgccggagcgttgggcgctcgtccggcgggcggttttgccgataagggcaaatcgcaccacaccacaactttcggtctgctgctgctgttactttcatggctggcaatctggtttggtcacacttccgtactggcgctgattatcggcatcctggtgctggacctcaccgtgcagggcgtgcatatcactaaccagacggtaatttatcgaatacaccctgatgcgcgtaatcgcctgaccgcaggttacatgaccagctactttattggcggtgccgccggttcgctaatttcagcctcagcctggcaacatggcagttgggctggcgtgtgtctggctggcgcgacgattgccctggttaacttactggtctggtggcgaggttttcatcgtcaggaagccgcaaattaagcaatcagcaaccgttttctgtggctttacacttataagggtgttaagaagcccatcagtctgataaggttaagatattcattcagtctatttataatattaacaatcgttaagcgtacactctatggaaagccctactccacagcctgctcctggttcggcgaccttcatggaaggatgcaaagacagtttaccgattgttattagttatattccggtggcctttgcgttcggtctgaatgcgacccgtctgggattctctcctctcgaaagcgtttttttctcctgcatcatttatgcaggcgcgagccagttcgtcattaccgcgatgctggcagccgggagtagtttgtgggttgctgcactgaccgtcatggcaatggatgttcgccatgttttgtatggcccgtcactgcgtagccgtattattcagcgtctgcaaaaatcgaaaaccgccctgtgggcgtttggcctgacggatgaggtttttgccgccgcaaccgcaaaactggtacgcaataatcgccgctggagcgaaaactggatgatcggcattgccttcagttcatggtcatcgtgggtatttggtacggtaataggggcattctccggcagcggcttgctgcaaggttatcccgccgttgaagcagcattaggttttatgcttccggcactctttatgagtttcctgctcgcctctttccagcgcaaacaatctctttgcgttaccgcagcgttagttggtgcccttgcaggcgtaacgctattttctattcccgtcgccattctggcaggcattgtctgtggctgcctcactgcgttaatccaggcattctggcaaggagcgcccgatgagctatgaggttctgctgcttgggttactggttggcgcggcgaattattgcttccgctatctgccgctgcgcctgcgtgtgggtaatgcccgcccaaccaaacgtggcgcggtaggtattttgctcgacaccattggcatcgcctcgatatgcgctctgctggttgtctctaccgcaccagaagtgatgcacgatacacgccgtttcgtgcccacactggtcggcttcgcggtactgggtgccagtttctataaaacacgcagcattatcatcccaacactgcttagtgcgctggcctatgggctcgcctggaaagtgatggcgattatataacccacaagaatcatttttctaaaacaatacatttactttatttgtcactgtcgttactatatcggctgaaattaatgaggtcatacccaaatggatagttcgtttacgcccattgaacaaatgctaaaatttcgcgccagccgccacgaagattttccttatcaggagatccttctgacccgtctttgcatgcatatgcaaagcaagctgctggaaaaccgcaataaaatgctgaaggctcaggggattaacgagacgttgtttatggcgttgattacgctggagtctcaggaaaaccacagtattcagccttctgaattgagttgtgctcttggatcatcccgtaccaacgcgacgcgtattgccgatgaactggaaaaacgcggttggatcgaacgtcgtgaaagcgataacgatcgccgctgcctgcatctgcaattaacggaaaaaggtcacgagtttttgcgcgaggttttaccgccgcagcataactgcctgcatcaactctggtccgcgctcagcacaacagaaaaagaccagctcgagcaaatcacccgcaaattgctctcccgtctcgaccagatggaacaggacggtgtggttctcgaagcgatgagctaacgcgtcatctcgctcaaaaatccagatttataaaagaaaaaataaccggccagcatcgcaacatgctggcctttttggcaagcaggtcggctcagccgatgagttaagaagatcgtggagaacaatatgagcgcaaatgcggagactcaaaccccgcagcaaccggtaaagaagagcggcaaacgtaagcgtctgctcctccttctcaccttgctctttataattattgccgtagcgatagggatttattggtttttggtactgcgtcatttcgaagaaaccgatgacgcatacgtggcagggaatcagattcaaattatgtctcaggtgtctggcagcgtgacgaaagtctgggccgataacaccgattttgtaaaagaaggcgacgtgctggtcactctcgacccgacagatgctcgccaggcatttgaaaaagccaaaactgcactggcttccagcgttcgccaaacccaccagctgatgattaacagcaaacagttgcaggcgaatattgaggtgcaaaaaatcgccctcgcgaaagcacaaagcgactacaaccgccgtgtgccgctgggcaatgccaacctgattggtcgcgaagagctgcaacacgcccgcgacgccgtcaccagtgcccaggcgcaactggacgtcgctattcaacaatacaatgccaatcaggcgatgattctggggacgaaactggaagatcagcctgccgtgcaacaggctgccaccgaagtacgtaacgcctggctggcgctggagcgtacccgtattgtcagtccgatgaccggttatgtctcccgccgcgcggtacagcctggggcgcaaattagcccaacgacgccgctgatggcggtcgttccagccaccaatatgtgggtggatgccaactttaaagagacgcagattgccaatatgcgtatcggtcagccggtcaccatcaccaccgatatttacggcgatgatgtgaaatacaccggtaaagtggttggtctggatatgggcacaggtagcgcgttctcactgcttccggcgcaaaacgccaccggtaactggatcaaagtcgttcagcgtctgcctgtgcgtattgaactggaccagaaacagctggagcaatacccgctgcgtatcggtttatccacgctggtgagtgtcaataccactaaccgtgacggtcaggtactggcaaataaagtacgttccacaccggtcgcggtaagcaccgcgcgtgaaatcagcctggcacctgtcaataaactgatcgacgatatcgtaaaagctaacgctggctaatccagaggtgcgtgtgatgcaacagcaaaaaccgctggaaggcgcacaactggtcattatgacgattgcgctgtcactggcgacattcatgcaggtgctggactccaccattgctaacgtggcgatccccactatcgccgggaatctgggctcatcactcagtcagggaacgtgggtgatcacttctttcggggtggcgaatgccatctcgatcccgcttaccggctggctggcaaagcgcgtcggggaagtgaaattgttcctctggtcaaccatcgcctttgctattgcgtcgtgggcgtgtggtgtctccagcagcctgaatatgctgatcttcttccgcgtgattcaggggattgtcgccgggccgctgatcccgctttcacaaagtctattgctgaataactacccacctgccaaacgttctatcgcgctggcgttgtggtcgatgacggtgattgttgcgccaatttgcggcccgatcctcggcggttatatcagtgataattaccactggggctggatattcttcatcaacgtgccgattggcgtggcggtggtgttgatgacactgcaaactctgcgcggacgtgaaacccgcaccgaacggcggcggattgatgccgtggggctggcactgctggttattggtatcggcagcctgcagattatgctcgaccgcggtaaagagctggactggttctcatcacaggaaattatcatcctcaccgtggtggcggtggtggctatctgcttcctgattgtctgggagctgaccgacgataacccgatagtcgatctgtcgttgtttaagtcgcgcaacttcaccatcggctgcttgtgtatcagcctcgcgtatatgctctacttcggcgcgattgttctgctgccgcagttgttgcaggaggtctacggttacacggcgacgtgggcagggctggcctctgcgccggtagggattattccggtgatcctgtcgccgattatcggccgctttgcgcataaactggatatgcgccgactggtaaccttcagctttattatgtatgccgtctgcttctactggcgtgcctatacctttgaaccgggtatggattttggcgcgtcggcctggccacagtttatccagggcttcgcggtggcctgcttctttatgccgctgaccaccattacgctgtctggtctgccaccggaacgattggcggcggcgtcgagcctctccaactttacgcgaacgctggcggggtctatcggtacgtccataacgacgacgatgtggactaaccgcgagtcgatgcaccatgctcagttgaccgaatcggtgaacccgtataacccgaacgcccaggcgatgtacagtcaactggaagggcttggtatgacgcaacagcaggcatcaggctggattgcccagcagataaccaatcaggggctgattatttccgccaatgagatcttctggatgtcagccgggatattcctcgtcctgctggggctggtgtggtttgctaaaccgccatttggcgcaggtggcggcggaggtggtgcgcactaaggttgccaaagggagctgcggctccctttttatttgctcattctgcaaacggttgttttatacactcattcggtgtatcttttcgccgccccaaactcttccattcaccattaaccggttctgagcattcgctcaggttgttaattctctttttccttcgcccttgctttcgcgggtgatactcacatttttattttaaccccataactcgcaccctcgcgggcgtacatttattacacacaaaataatggattattatgaatacccaacgaaaatacgggagaacctggcattaccccttctctccaggcaccaccagcgatgaccgcattaacaccgattactggcaggatttacaggccatcacgcaattggtgcacacagaaaaactcgatggcgaaaataactgccttaaccgctacggcgtgtttgcccgctcccatgccacgcctacgcagtcggcatggacctataaaattcgccaacgctggcaactgctgaaaaacgatctcggcgacctggagttgtttggtgaaaatctctacgccgttcattccattgaataccgcgcgctggaacaggacttttacctgtttgccgttcgctgtggctgagctgggaagaggtgcagttttacgccgctctgtttgatttcccctgcgttcccgaaatctccggcccgcagccggggaatgatgaaaaaagctggcaacgtgattttctggcgctgaccaatgcgcgcggcacattcgatccctgggatacgcaaacctgtcaaccctgtacgctggaaggcattgtcagccgaaatcatgatgcgttttctgtcgctgacttttcgcataacgtcttcaagtatgtgcgcaaaaatcatgtcaaaaccactgtgcactggaaacgccactggcaacgggcgcggatggcccatgagttcgtttatggagaacagtcatgatttggcaacttaccgacgataaacgctggtcggcgctacgtcagcgttttagctgggttgaggagatgcatcacacgccacaagaccctgagcatcatggtgaaggcgacgtcggcgtacataccgaaatggtgcttaacgccctcattactctgccagaattccagcaactccccgctcaacagcaggaagttttatgggcggcagcgttattgcatgatgttgaaaagcgcagcactaccgtgcaggaaaacggacgtattcagtctcctggtcatgctcgtcggggcgaactgacggcccgacaaattttatggcgcgatatcccaacgccgttcgtgctgcgcgagcaaattgttgcactggtgcgtctgcatgggttaccgctatggttactggagcgcccggaaccggagcgtttgttgctcacggctgcaatgcgcatcgacacgcgtctgctcgctttgcttgctcgtgccgatctgcttggtcgccaaagcccggatcagcaatcaatgctggaacgcatcgatctgttcgagctgttttgccatgagcaacaatgctggggaaaaatgcgcccgttcgtttctgattccgcacgctggcattacctgacccatgagcaaagttctcctgattttgttccctgggaggctgaaccttttgaggtcattttgctgtgtggcttaccgggtatgggcaaagatcgctatatcaatgaacagtgccagggaatggacgttatcagccttgatgatatgcggcggcgaatcaatgccagtccggacgacaaaaccgccaccgggcgtattgtgcaacaggcaaaagaagaggcacgcgtttttttacgccagaaaaaaccgttcatctggaatgcaacgaacattacccgccagctgagtagccaactcatcaacctgtttacggcttacggcgcacgagtaaaaatcgtttatcttgaagtgccatgggcgcaatggaagcagcaaaatgccagacgcgagtatgcagttcctgaagcggtcgtgatgcggatggcctcaaggctggaagttcctcaacctgatgaagcacatagcgtggagtatcgggtgattgaaaggtaaaaaaaccgggcggtggtgtcacctgcccggcttcttttgttccactgactagatgtgcagttcctgcaacttctctttcggcagcgccagttcttcgttgctgttgatgcgcacgtcacgttccagaatgttacgcgcaatatcctgcgcttcctgcaacgagtgcatctggtaagtgccacactggtagacgttcagttccgggatctgattctgatcctgcactttcagcacgtcttccattgccgctttccaggcatcagcgacacgctgctcatctggcgtaccaatcagactcatataaaaaccggtgcggcagcccattggcgagatatcgataatctctacgccattaccgttaagatggttacgcataaaaccagcaaacaagtgctccagggtatggatccctctttctggcatcacttctttgttcggcacgcagaagcgcagatcgaacacggtgattgcgtcgccatgcggggtgttcattgttttcgccacccgaactgcaggcgcttccatccgggtatgatcgactgtgaagctatctaacaacggcatttagccacctccggtaatttttttaaaaattttctgaactctttcttcccaggcgagtctgagtatatgaaagacgcgcatttgttatcatcatccctgaattcagagatgaaattttggccactcacgagtggcctttttcttttctgtcaggcgtgtttttccagccacactgcaaacggttcggtatcagcggcttccatttcctgctgacggcgttcagacgcctcgcgctcggctacaaaatcctcttcgcgcagaatttccagcggctcttcacgcagcagattacggtacgcttcagcaaacgctttgcctgttccgccaataccagtatcaatcatagaccttaagatacgggcagagaaagtcagatcgggattatcgaagcaggcgaccagttcatcacacactttctgatacgcttcgccgccgttaatgctatccagcgtttgcgcgacgcgtttcagatcgcggaacagatctttacccacctgcggtaacgggaactgcgcagtttcgcagccgatacccagcgtcaggcccggtttgcgaccttcgaggatcacccggttccagttaacgcgtgtacaggcaagttcgctactgctcatttccggtgcatcagccagcgcacaccagaccataaacaggtcgaggaatcgcacctgttgttcatctacaccaatcggcgagaacgggttgatgtccagcgagcggacttcaatatattcaatgccgccacgtaacagcgcatcagaaggcgactcgccgctgcgggtaacgcgttttggacgaatcggcgcgtacagttcgttttcaatctgcagcacgttgctgttgatttgcagccgcttaccgtctttctcaataccaatcttcgcgtactcttccgatggcgttttgattgcctgtttaaggcccgccacgtactcgtagagatcattgaaggtgataccaagattgctttgcgatttattggtatagccgagatcgctcaaacgaagagaggtcgcatacggcaggtaatacataccgcactcggttttctcaaacggcagcgacgttggttttccttgcaagaaagaagaacaaatcgctggagacgcaccaaacagataaggaatgacccaaccgaaacgatagtaattgcggataacgcggaaatagcccgcagaaattttctctttggcatcagcgcccgagatatcaccgcacttcgcttgccagaatgccattggcaaagagaaattatagtgcacgccggaaatggtttgcatcagcgcgccgtagcgatttttcagcccttcacggtacagcgttttaaagcgaccggtgttagaagtgccgtactgtgccagttcgatgtcctgaccttctgcgatgtagcatggcatacttaacggccacatccgctcatcgcccatattgcgcgccgtatagcgatgcagatcgcgcataaaggtcagcatatgttcaatatcaccatccactggtgtaataaattccagcaatgcttccgcaaaatcggtagtaatccatttatgggtcagtgcagaacctaatgcttcaggatgacctgttgttgccagtgtgccatcagcattaacacgcaaagtttcgcgctccagcccacgctgtatcccctttaacgcctgaggatgtttttccagccaggccagcgcctgtgatacgtccgggatcaaattgacctcccgcctgtcaaaatcgttttaattagcataactgtaatggtgaccatatgtgcaggcctacaattagtgccaccacatcatgccctgaacggtagctgctgcaactgcaacatagcgtaacgctttaccaaggcacaaaaaaaagattaccggtccccacgagatgcgcatccatcccgctaacagacacagtaaatcgccaaccacgggcatccagcttaataatagcgtgactgcaccatagcgtttcagccagccggtagctttctcttgccagcgcgatgttttacgcaatggaaagaaacgcccaaggataacgttagttaaccctccaaggctattacccattgttgctgttaaaactaaaacccagggatgactcactccggaaagcaacattgccaccagcacgacttcggagttgccgggtaatagtgtagcgctgagaaaactactggcaaacaacgagaaaagcgataacgcttcactcacagcaagcgaacatccacggcgtccatgcctgctgcacgggccgcctgaataccgaaatcggcatcttcaaagaccacacactgcgtcggttgcacgcccatacgctgcgcgcacaacaaaaatgtgtctggcgcgggtttatggtgtttgacgtgatcggcagcgacgacggcgtcaaaataacggcgtaatcccaggtgtgccagcaatgcctcagcgatggcgctttcactccccgttcctacagccattgggcgacgaccatgccagcttttcaccacttcaacaagaggaagcggctcgacactatccagcagcatacttcttactgcttctgttttttcacgcgctaacgcatgcgggtcgagatcggcctgattcagctcaataatcgcctgagcaatacgccaggtgggcgagccattaagcgcaatcatcgcctgaacatcgtactgaagaccgtagtgccctaatacttcgcgccacgctttacggtgcgtaggctcggtatccaggatggtgccatccatatcaaaaattaaacctgcataacgctcgtacatggtcttctcgcaagtagaaaaatatgacgctactttagcgtaattgcttgattttgtcgctgatggcgaaggagaagaaaattcaggaaatggataaagtagttatttagaaatgagatatttttgaaggaaattttttggagaatatggtgcatccgggaggatgactcactggcgctcgcccttcgggccgctgctggcgcaacgttatcctccctggtgcctgcggttaataccgctacctcttcgataccttcattgctgaaggttacggagaatatggtgcatccgggaggattcgaacctccgaccgctcggttcgtagccgagtactctatccagctgagctacggatgcatcggaaaaatttattttactgctgatattgatatcgctactaaagccatatcaagtaagagatggtgcatccgggaggattcgaacctccgaccgctcggttcgtagccgagtactctatccagctgagctacggatgcatcgggaaatttattttactgctgatattgatatcgccactaaagccatatcaagtaagagatggtgcatccgggaggattcgaacctccgaccgctcggttcgtagccgagtactctatccagctgagctacggatgcatcgggaaatttattttactgctgatattgatatcgccactaaagccatatcaagtaagagatggtgcatccgggaggattcgaacctccgaccgctcggttcgtagccgagtactctatccagctgagctacggatgcatcgggaaacttactttactgcagattttttgataccgccactaaagtcgtatcaagtaagagatggtgcatccgggaggattcgaacctccgaccgctcggttcgtagccgagtactctatccagctgagctacggatgcaaatggcggtgaggcggggattcgaaccccggatgcagcttttgaccgcatactcccttagcaggggagcgccttcagcctctcggccacctcaccacacgcctcttacgagtgcttcgaagaacttgtttatcgctcatcgtcgctgcgtggcgcacatattactttctgagacttataagtcaaacaatttttcccacacttttatcgtttgcacacttcacgctcaattagtctgtaaaaacgtcaaaaagagtgttttatcaacagaaaaacggaggtctgacagatagcagtaatgcaaaaaaatggagacttaagttgaatgaacgggagtaaagcgaaaagacaatggagtgaaagagaaattttgagggtgcgtctcaccgataaagatgagacgcggaaagattagtaactggactgctgggatttttcagcctggatacgctggtagatctcttcacggtgaacagaaacttccttcggggcatttacgccaatacgtacctggttgccctttacccctaaaactgtcacggtgacctcatccccaatcatgagggtctcaccaactcgacgagtcagaatcagcattctttgctccttgaaagattaaaagagtcgggtctctctgtatcccggcattatccatcatataacgccaaaaagtaagcaatgacaaacacattacatctaagcagtcatggcattacattctgttaaacctaagtttagccgatatacacaacttcaacctgactttatcgttgtcgatagcgttaatgcgaatgccgtgaagcgagtccacggcattgcctgacgcttatattattgcaatttcgcgctgacccagcctttcacactggctaacgctgcaggtaaggccgcagcatccgtaccaccggcttgcgccatgtcaggacgtccaccacccttgccgcccacctgctgagcgaccataccaatcagttcccctgctttcacacgatctgtgacgtccttagatacgcctgcaatcagagaaaccttaccttcggctaccgttgccagcacgataattgtcgaccccagctgattttttaaatcgtcaaccatggtacgcaacattttcggctcaacaccgctaagctcgctaaccaacagcttaacaccattaacatcaattgccttactggaaagatttgcgctctcctgtgcggcagcttgttctttaagctgttgtaactctttttccagctgacgcgtacgttccagtactgaacgcactttatcagccagattattgctatcgcctttcagcagatgcgcgacttcgcttaagcgatcgctgtctgcatgaacggtggcgatagcgccttctccggttaccgcttcgatacgacgaacgcctgcagcagtacccgattcagagatgatgcggaacagaccaatatcaccagtgcggctggcgtgagtaccgccacacagctcggtggagaaatcgcccatgctcagcacgcgtacgcgctcatcatacttctcgccaaacagcgccatcgcacctttcgctttcgccgcttcgagatccatgatgttggtttcgatcggcaagttacggcgaatctgtgcgttcaccaggtcttcgaccgcacgaatctcttctggtttcatcgcttcgttgtgtgagaagtcgaagcgcagcactttgtcgttaaccagtgaacctttctgcgatacatgagtacccagaacctggcgcagcgcagcgtgcatcaggtgcgttgcggagtgattcagacgaatacgggcgcgacgagcctcatcaacatcagcctgcacagcgtcgcccactttcagagaacccgcagcaagtttaccgatgtgaccaatcgcctggccgtatttctgcgtatcttccaccgcgaaggagaagttagcgcctttcagttcgcctttatcaccaacctgaccgccggattccgcatagaatggcgtttgatccagcacgaccacagcttcctggcctgcattgatggcatcaaccgctttaccatcaacaaacagcgcggtcactttgccgttcagttccagatggtcatagcctttaaattcagatgcactgtcaacacggatcattgcgttgtaatcggcaccaaagccgctggcttcgcgcgcacgacgacgctgctcttccattgctgcttcaaaaccagcttcgtcaactttgatgttgcgctcacgacaaacatcagccgtcaggtcaaccgggaagccgtaggtgtcgtacaggcggaaagcagtttcaccatccagcgtatcaccagaaagttttgccagctcttcatccagcagcgccagaccgcgctccagagtacgggcaaactgctcttcttcagtcttcagcacctgctcaacctgcgcctgctggcgtttcaggtcttcacccgcagagcccataacgtcgatcagcggaccaaccagtttgtagaagaaggtttctttcgcgccgagcatattgccgtgacgcactgcgcgacgaatgatacgacgcagtacataaccacggttttcgttggacggcattacgccatccgcgatcaggaacgcacaagaacgaatgtggtcagcgattacgcgcagcgatttattgctcagatcggttgcgccagtgactttcgctaccgcctggatcaacgtgcggaacaggtcgatgtcatagttagagttaacgtgttgcagcacccgcagcaatacgctccagacccataccggtatctacagacggtttcggcagcggttccatcgtgccatcggcctggcggttgaactgcatgaagacgatgttccagatctcaatgtagcggtcgccgtcttcttccggacttcccggagggccgccccaaatgtggtcgccgtgatcgtagaagatttcggtgcacgggccgcacggaccagtgtcacccatctgccagaagttgtcagatgcgtatggcgcacctttgttatcgccgatgcgaataatacgttcgcgcgggatccctacttctttttcccagatttcgtaggcttcgtcgtcgctttcatagacggtaacccacagacgctctttcggcagggcaaaccatttttcgctggtcagcagttcccatgcaaactgaatggcatcgtgtttgaaatagtcgccgaagctgaagttgcccagcatttcgaagaaggtatgatgacgcgcggtgtaaccgacgttttccaggtcgttgtgtttaccacccgcacgcacgcagcgttgggaagtggtagcgcgggaataattacgcttgtcgagcccaaggaacacatccttgaactggttcatcccggcgttggtaaacaacaaagttgggtcgttatggggtaccagggagctgctggcaactacctgatgtcccttactatggaaaaagtcgagaaacgcctgacggatctcagcggtgctcttgctcataattatcctgaaatcaagctaacgaaatatcgctaccagccgttgcgtgtcgttaaccgcccggctggtaactgaaaagtgggaataagataagttttcttgactgggaagtaaaatcccgtatgcgttcagtcggcaaaatttcgccaaatatcctggatatcttccatcagatagccacgatagagcagaaaacgctggatcttaactttttctgaaaagacagttggcaaaggttcgccatattttcgcgtcgcctgatcgcgcgccagtgcgcaccagtcgatgtcacattcacgcatcgctttttctgtcgcttcgcgggaaatacctttctgattcagttcctgacgaatacgcgcaggtccataacctttgcggctacggctggcgataaagcgcgcaacaaatcggctgtcatcaagatagccatgttcatggcaccaggcaataacgcgctcgtaatcttctgccgtggcatcaatctcttccgggccatttttgcccataatcggtgccgcgagtttacgtcgcagttcttgctcactgtgatcgcgcaccgccagaatgcgtaccgcacgatccaacaggcgagcatatgccgggcgacgggatgttgattctgtcatggcatatccttacaacttaaaaaagcaaaagggccgcagatgcgacccttgtgtatcaaacaagacgattaaaaatcttcgttagtttctgctacgccttcgctgtcatctacagagaaatccggcgttgagttcgggttgctcagcagcaactcacgtactttcttctcgatctctttcgcggtttccgggttatctttcagccaggcagtcgcattcgctttaccctgaccgatcttctcacctttgtagctgtaccacgcgcctgctttctcgataagcttctctttcacgcccaggtcaaccagctcgccgtagaagttgataccttcgccgtagaggatctggaattcagcctgtttaaacggcgcagcgattttgttcttcaccactttcacgcgggtttcgctacccaccacgttttcgccctctttcaccgcgccgatacgacggatgtcgagacgaacagaggcgtagaatttcagcgcgttaccaccggtagtggtttccgggttaccgaacatcacaccaattttcatacggatctggttgatgaagatcagcagcgtgttggactgcttcaggttacccgccagcttacgcatcgcctggctcatcatacgtgccgcaaggcccatgtgagagtcgccgatttcgccttcgatttccgctttcggcgtcagtgccgccacggagtcaacgacgataacgtctactgcgccagaacgtgccagggcatcacagatttccagtgcctgctcgccggtatccggctgggagcacagcaggttgtcaatatcgacgcccagtttacgtgcgtagattgggtccagcgcgtgttcagcatcgataaacgcacaggttttaccttcgcgctgcgctgcggcgatcacctgcaacgtcagcgtggttttaccggaagattctggtccgtagatttcgacgatacggcccatcggcagaccacctgccccaagcgcgatatccagtgaaagcgaaccggtagagatggtttccacatccatggaacggtcttcacccaggcgcatgatggagcctttaccaaattgtttctcaatctggcccagtgctgccgccaacgctttctgtttgttttcgtcgatagccatttttactcctgtcatgccgggtaataccggatagtcaatatgttctgttgaagcaattatactgtatgctcatacagtatcaagtgttttgtagaaattgttgccacaaggtctgcaatgcatacgcagtagcctgacgacgcaccgcatcacggtcaccgctgaagcattcccgccgggtaatgccttcaccacgggcagtggcaaaagcaaaccagacggtgccgacaggcttctcttcactgccgccatccggcccggcgataccactaatagacacggcgtaatcagcacgagccgctttcagtgcgcctatcgccatttccaccacgacaggttcgctcaccgcgccatgctgcgccagcgtctcttcgcgtacaccgatcatttgcgcttttgcttcgttactgtaggtgacaaatccgcgttcaaaccaggcggaactgccggcaatatcggtaatcactttcgctacccaaccgccggtacaagactcagcagttgttacggttgcgccacgggctttcagcgcctgcccaacctgttcgcttaactgcatcagttcactgtcagtcatcacaacctctgtcagtcaaaaatttatgccggacaagataacactttcgtcaggaagatggtgttggcgttgcaattttacgaggaggattcagaaaaaagctgattagccagagggaagctcacgcccccctcttgcaaatagttactgcacgcgcgccagcgccacggcttgtcctaactgccagaccgccattgcgtaatgggtgctgtggttataacgggtaatggtgtagaagttcggcagaccgtaccagtactggtagccggtgccaacatccagacgcagcaggctggcttgttgatggttgcccagcggctgctgtggcgttaaacctgccgcggcaagctgcgaaatgctgtacctggttttgaagccatttggcaagcctggcgcctgaccgtttgccattaccgcgacctgatcgcctttcacccagccgtgcgctttgaaataattcgccacgctaccgatcgcatcaaccggatcccacaggttgatatgcccgtcgccgctgaaatctaccgcatattgtttgtaagacgacggcataaactgaccgtagcccatcgccccggcaaaggaacctttcagattgagcggatcgtcctgctcgtcgcgcgccatcagcaggaaggtttccagctcgccagaaaaatactccgcgcggcgtgggtagttaaatgacagcgttgccagcgcatcgaggatgcgagttttccccatcacgcgcccccagcgggtttcaacgccgataatcccgacgataatttccggcggtacaccatacacctgccacgcgcgattcaacgcatcttcatactgattccagaaaaccacaccgttctgcacgttgtccggcgtaataaattttttgcgataacgcagccatgcgccgttcggacctgatggcggtttcaccgatgtggttggtgcctggttatccatcagccgcagtaccgaatccagacgtttcgcctgggagagaatttcctgcaactgctgacgatcgaaaccgtgtttgttcaccattttgtcgatgaactgctgggcattcgggttattggcgaagtcaccgcccatctgcatcacattgtgctgcggctcaagcaggaagccgccagacggcgttccggtggtcgtttcagtctcagtaggttttggcttgctgctacaggcggcaagcaacataaaaaggggaagcaatgttacataacgacgcttgaacatgaggggtccatttaacagattcaaccaggggcaagtatggtaaagcatcccgccccgcacaaggaagcggtagtcactgcccgatacggactttacataactcaactcattctcctcactaccctctttatataaactttcaaaataaaatatttatctttcattttgcgatcaaaataacacttttaaatctttcaatctgattagattagattgccgtttggtaataaaacaataaatcctgaaggagagaacaatgatagaaaccattactcatggcgcagagtggttcatcgggctgttccagaaaggcggagaagtgtttaccgggatggtaaccggcattcttccgctgttaattagcctgctggttatcatgaacgcattgattaattttatcggtcagcatcgtattgaacgatttgctcaacgttgcgccggtaaccctgtttcccgttatctgctgctaccgtgcattggtacgtttgtcttttgtaacccgatgaccttaagtcttggtcgctttatgccggaaaagtacaaacccagctattacgcggcggcctcttatagctgccactcaatgaatggcctcttcccccatatcaaccctggcgaactgtttgtttatctcggcattgccagcggtctgacaacactgaatctgccacttggcccactggcggtgagctatctgctggttggtctggtcaccaacttcttccgcggctgggtaaccgatctgaccaccgccattttcgagaaaaagatgggcattcaacttgaacaaaaagttcgtctggcaggagcaacatcatgacacgcattcggatcgaaaaaggaacgggtggctggggcggcccgcttgagctggaagccacgccgggcaaaaaaatcgtctatatcaccgccggtacccggcctgcgattgttgacaaactggcacagcttactggctggcaagctatcgacggatttaaagaaggtgaacccgcggaggcggaaattggtgtcgcggtaatcgactgtggcggcacattacgctgcggcatctatccgaaacggcgtattcccaccattaatatccactcgacgggcaagtccggcccgctggcgcagtacattgtggaagatatttatgtctctggcgtaaaagaagaaaacatcactgtagtgagtgaggcgacaccacaaccctcttccgtgggccgtgactatgacaccagcaagaaaatcaccgaacaaagcgatggtttactggcgaaggtgggaatgggtatgggttccgccgttgccgtgttgtttcaatctggtcgtgacaccatcgacactgtattaaaaaccattctgccgtttatggcgttcgtctcggcgcttatcggaatcattatggcttctggccttggtgactggattgcccacggtcttgctccgctggcgagccatccactgggtctggtcatgctggcgctcatctgctccttcccgctgctttcacctttcctcggcccaggcgcagttatcgcacaggttatcggcgtattgattggcgtgcagattggtctcggcaatattccgccgcatctggctttacctgcactgtttgccatcaacgcgcaggcggcctgcgacttcatcccggtcggtttgtcgctggcggaagctcgtcaggacacggttcgcgtcggtgtcccttctgttctggtgagccgctttttaaccggcgcgccaactgtactgatcgcctggtttgtctccggttttatctatcaatagaggctgaaacatgaccgttatttatcagaccaccatcacccgtattggcgcgagtgccactgacgccctcagcgaccagatgctcatcacctttcgtgaaggcgcgcctgcggatctcgaagagtattgcttcattcattgccacggcgagttgaaaggtgcactccatcccggtttgcaattttctctcgggcggcatcgctatccggtgaccgccgttggcagcgtggcggaagacaaccttcgcgaactgggtcatgtcaccctgcgcttcgatggtttaagcgaagcggaatttccgggcactgtccatgtggcaggccctgtacccgacgatatcgcgccgggatcggttttgaagtttgaatctgttaaggagtaaaaaatgaatcaggttgccgttgtcatcggtggtgggcaaaccttaggcgcgttcctgtgccacggtctggctgccgaggggtatcgcgtggcggttgtcgatattcagagcgacaaagccgcaaatgtggcacaagaaattaacgccgaatatggtgaaggaacagcgtacggttttggtgctgacgccaccagcgagcaaagcgttctggcgctttctcgtggggtagatgaaatctttggtcgcgtggatttgctggtctacagcgccggaatagcaaaagcagcctttatcagcgacttccagctcggcgattttgaccgttcgctacaggtgaatctggtgggttatttcctgtgtgcccgtgaattttcgcgtttgatgatccgcgacgggattcagggtcgcattattcagatcaactcgaaatccggcaaagtgggcagcaaacacaactctggctacagcgccgcgaaatttggtggcgtcgggctgactcaatcactggcgctggatctggcggagtacggcattacggtgcattcgctgatgctcggtaacctgctgaaatcgcctatgttccagtcgctattgccacaatacgcgaccaagctgggtatcaaaccggagcaagtcgagcagtattacatcgataaagtaccgctcaaacgcggctgcgattatcaggatgtgctgaatatgctgctgttctacgccagtcctaaggcgtcgtactgcactggtcagtcgatcaatgtcaccggcggtcaggtgatgttctgatcaacagcggagatcttttaaggatctccgcgcgactaatagaatgcctgatgcgctacgcttatcaggcctacaggacttccgccactacattacggagaagttatggtatccgcactcatcaccgtcgccgttatcgcctggtgtgcgcaactggccttaggcggttggcaaatttctctttttaaccgtgccttcgacacgctatgccagcaagggagggttggcgtgggccgttccagcgggcgctttaaaccgcgggtcgtggtcgctattgcgctggacgatcagcagcgcatcgtcgacaccttgtttatgaaaggactgaccgtcttcgcccgaccgcaaaaaattcccgcaattaccggcatgcatgtgggtgatttacagcctgatgtgatctttccccatgatccactatcacagaatgctctatcattggcgcttaaactgaaacgtggataatttcgttgtgaatgttacttgcttgcgaagttatcattttgaaacctaaatcaggtaatcacgcccatgaaacctcgtcagcgtcaggccgccattctggagtatctacaaaagcagggtaaatgctcggttgaagaattggcgcaatactttgacaccacaggcacaaccattcgcaaagatctggtcattctggaacatgccggaaccgtcattcgtacttatggcggcgtggtgttgaacaaagaggaatccgatccgcctatcgatcataaaacgcttatcaacacccacaaaaaagagctgattgcagaagctgccgttggttttattcatgatggcgactcaataattcttgatgctggcagtaccgtgttgcagatggtgcctctgctatcgcgctttaataacatcacggtgatgaccaacagcctgcacatcgtcaatgcgctatccgaactggataacgaacaaactatcctgatgccaggcggaacatttcgcaaaaaatcggcctcatttcacgggcaactggcagagaatgccttcgagcatttcaccttcgataaattgtttatgggcaccgacggcatcgatctcaatgcgggcgtaaccacctttaacgaggtctataccgtcagtaaggcgatgtgtaatgccgcgcgcgaagtgattttgatggctgactcatcgaagtttggtcgtaaaagccccaacgtggtttgtagtcttgaaagcgtcgataagctgattaccgacgcaggtatcgatccagcgtttcgtcaggcgctggaagaaaaagggatcgacgtgatcataaccggagagagcaatgagtgaagcactactgaacgcgggacgtcagacgttaatgctggagttgcaggaagcaagccatttaccggaacgtctgggcgatgatttcgttcgcgccgccaatatcatcctgcactgcgaaggcaaagtggtggtttcgggaattggcaaatcgggccacattggtaagaaaatcgccgcaacgcttgccagcaccggcacaccggctttttttgtccatccggcagaagcactgcacggcgatctggggatgattgaaagccgcgatgtgatgctgtttatctcttattccggtggcgcgaaggaactggatctcattattccgcgtctggaagacaaatctatcgcgctgctggcaatgaccggaaaaccgacgtcaccgctgggcctggcggcgaaagcggtgctggatatctccgtagagcgcgaagcctgcccgatgcaccttgcgccgacctccagcaccgtgaataccctgatgatgggcgacgcgctggcgatggcggtcatgcaggcgcgcggatttaatgaagaagattttgcccgctcccacccagccggggcactgggcgctcgcttgctgaacaaagtgcatcatcttatgcgtcgtgacgatgccatcccgcaggtggcgttaaccgccagcgtgatggacgcgatgctggaacttagccgcaccggtttaggtctggtggcagtgtgcgatgatcaacgactggtgaaaggcgtctttaccgacggtgatttacgtcgctggctggttggcggcggcgcactcaccacgccagtcaatgaagcgatgacggtcggcggcaccacgttgcaatcgcaaagccgtgccatcgacgccaaagaaatcctgatgaaacgcaaaatcaccgccgcaccggtagtggatgaaaacggcaaactcaccggcgcaattaacctgcaggatttctatcaggccgggattatttaatccttcagccccagacgtttcgccagcctatgcaggttggcgacgtcggtttccagcatccgcgcacaggcggcccagttgtgatgattttgcgccagtgcctgacgaatggtttcacgctggaacgcttctgtcgcttcacgcaggttttgcttaacaacgggcaccgccgccacttctggcggcggcaacgtcacctcaggaaaagcaaaatgttgcgcctcaagaatcacttcatcgccgctgcgggttgctctcgccagcactaccgcccgatgaatagcatgttccagttcacgaacgttccccggaaaattgtagtgttgcagtaaatttcgcgctccggcacttaataccactcgggagagccccagccgcaaacgacactgctcgcagaaataccccgccagcagaatgacatcatcgccccgctcacgcagcggcggcactgaaagtggaaacacgctcaggcggtggaacaagtcagcgcgaaatcgccctgccagtacctcttcgcgtaagtcacggttagtcgccgccagcacgcgcacatcgacccgcaaactgcggtcatcgccaacgcgttgaatatcgccatactgcaacaccctcagcagcttggcctgcaatgccaacgacaactcgccgatctcatcgagaaacagcgtgccgttatccgccatttcaaacttcccgctgcggttactgatagcaccagtaaacgcccctttcacatgcccgaacaactcactttccgccacactttccggcagtgcggcacagttgagatagaccagcggattcaccgcccgtggcgaggcttcatgaatcgctttcgccaccagctccttaccggttcccgtctcaccgctaattaaaacgttgagatcggatgccgccacaatctcaatctcttttttcaattgcgtcatgcctggcgacagaccgatcatctgcgtctgtttcaccgcttcaaacggcgcggcttcgcctggcagcatattctggctttccagttgttcaatcagtaacgcattgcttaacgctcccgccgccagcgcagcaatcaggcgtaactcttcgtcgctgaaaacatcgaactgatcgggctgcatcccgtcgagcgtcaaggcaccgatcaggttttgcccggcaaacaacggcaaaccaacgcaggcgtgaaccttcagactctcctgccctggaatcaaaccgtcataaggatcgggcaattcgctgtctgcgggaaagcgcaccacatcacccgcgcgggcaatcgcttccagccgtggatgcccttccagcgcaaagcgtctaccgagtacatccttcgccagcccgtcgatggcaagcggaataaactgccgcgagtcgtaacgtagcaacgcagacgcatcgcactccagcacctgacgcagcgtggtgatcaggcgttgaaaacgatcctgatgaccaatcccacgctgcaattcgatggcgatattcgccagcacatcaacggaaaaactcatctttgcctcactgtcaatttgactatagatattgtcatatcgaccatttgattgatagtcattttgactactcattaatgagcataattttatttatagagtaaaaacaattagataaaaaactggcacgcaatctgcaatcagcaagacatctttttagaacacgctcgggttgctctcgccagcactaccgcccgatgaatagcatgttccagttcacgaacgttccccggaaaattgtagtgttgcagtaaatttcgcgctccggcacttaataccactcgggagagccccagccgcaaacgacactgctcgcagaaataccccgccagcagaatgacatcatcgccccgctcacgcagcggcggcactgaaagtggaaacacgctcaggcggtggaacaagtcagcgcgaaatcgccctgccagtacctcttcgcgtaagtcacggttagtcgccgccagcacgcgcacatcgacccgcaaactgcggtcatcgccaacgcgttgaatatcgccatactgcaacaccctcagcagcttggcctgcaatgccaacgacaactcgccgatctcatcgagaaacagcgtgccgttatccgccatttcaaacttcccgctgcggttactgatagcaccagtaaacgcccctttcacatgcccgaacaactcactttccgccacactttccggcagtgcggcacagttgagatagaccagcggattcaccgcccgtggcgaggcttcatgaatcgctttcgccaccagctccttaccggttcccgtctcaccgctaattaaaacgttgagatcggatgccgccacaatctcaatctcttttttcaattgcgtcatgcctggcgacagaccgatcatctgcgtctgtttcaccgcttcaaacggcgcggcttcgcctggcagcatattctggctttccagttgttcaatcagtaacgcattgcttaacgctcccgccgccagcgcagcaatcaggcgtaactcttcgtcgctgaaaacatcgaactgatcgggctgcatcccgtcgagcgtcaaggcaccgatcaggttttgcccggcaaacaacggcaaaccaacgcaggcgtgaaccttcagactctcctgccctggaatcaaaccgtcataaggatcgggcaattcgctgtctgcgggaaagcgcaccacatcacccgcgcgggcaatcgcttccagccgtggatgcccttccagcgcaaagcgtctaccgagtacatccttcgccagcccgtcgatggcaagcggaataaactgccgcgagtcgtaacgtagcaacgcagacgcatcgcactccagcacctgacgcagcgtggtgatcaggcgttgaaaacgatcctgatgaccaatcccacgctgcaattcgatggcgatattcgccagcacatcaacggaaaaactcatctttgcctcactgtcaatttgactatagatattgtcatatcgaccatttgattgatagtcattttgactactcattaatgagcataattttatttatagagtaaaaacaattagataaaaaactggcacgcaatctgcaatcagcaagacatctttttagaacacgctgaataaattgaggttgctatgtctattgtggtgaaaaataacattcattgggttggtcaacgtgactgggaagtgcgtgattttcacggtacagaatataaaacgctgcgcggcagcagctacaacagctacctcatccgcgaagaaaaaaacgtgctgatcgacaccgtcgaccataaattcagccgcgaatttgtgcagaacctgcgtaatgaaatcgatctggcagatatcgattacatcgtaattaaccatgctgaagaggaccacgccggggcgctgaccgaactgatggcgcaaattcccgatacgccgatctactgtacagccaacgctatcgactcgataaatggtcatcaccatcatccggagtggaattttaatgtggtgaaaactggcgacacgctggatatcggcaacggcaaacagctcatttttgtcgaaacgccaatgctgcactggccggacagcatgatgacttacctgacaggcgacgcggtgctgttcagtaacgatgctttcggtcagcactactgcgacgagcatctgttcaacgatgaagtggatcagactgagcttttcgagcagtgccagcgttactacgccaatatcctgacgccgttcagccgcctggtaacgccgaaaattaccgagatcctgggctttaacttgccagtcgatatgatagcgacctctcacggcgtggtatggcgcgataacccgacgcaaattgtcgagctgtacctgaaatgggcggcggattatcaggaagacagaatcaccattttctacgacaccatgtcgaataacacccgcatgatggctgacgctatcgcccaagggattgcggaaaccgacccacgcgtggcggtgaaaattttcaacgtcgcccgaagcgataaaaacgaaatcctgaccaatgtcttccgctcaaaaggcgtactggtcggcacttctacgatgaataatgtgatgatgccgaaaatcgccgggctggtggaggagatgaccggattacgcttccgtaacaaacgcgccagcgctttcggctctcacggctggagcggcggtgcggtggatcgtctttccacgcgcctgcaggatgcgggtttcgaaatgtcgcttagcctgaaagccaaatggcgaccagaccaggacgctctggagttatgtcgtgaacacggtcgcgaaatcgcccgtcagtgggcgctcgcgccgctgccgcagagcacggtgaatacggtggttaaagaagaaacctctgccgccacgacggctgacctcggcccacggatgcaatgcagcgtctgccagtggatttacgatccggcaaaaggcgagccaatgcaggacgttgcgccaggaacgccgtggagtgaagtcccggataacttcctgtgcccggaatgctctctcggcaaagacgtctttgacgaactggcatcggaggcaaaatgagcaacggcattgtgatcattggttcgggcttcgccgcccgccaactggtgaaaaatattcgcaaacaggacgccagtattccattaaccctgattgccgccgacagcatggatgagtacaacaaacctgacctcagccatgttatcagtcaggggcaacgtgccgacgaccttacccgccagacggcaggtgaatttgccgagcagtttaatctgcgcctgtttccgcacacctgggtaacggatatcgatgccgaagcccatgtggtgaaaagtcagaataatcagtggcaatacgacaagttagtgctggcaaccggtgccagcgcctttgtcccgccagtgcccgggcgtgagttaatgctgacgttaaatagtcagcaagagtatcgcgcctgtgaaacgcaactgcgggatgcccgacgcgtgttgattgtcggcggtggtttgattggtagtgaactggcgatggatttttgtcgggcaggcaaagcggtcacgctaatcgacaacgctgccagtattctggcgtcgttaatgccaacggaagtcagcagccgcttgcagcatcggttgacggagatgggcgttcatctgctgttgaaatctcagttgcagggactagaaaaaacagattctggcattctggcaacgctggaccgccagcgctgcatcgaagtggatgcggtaattgccgccaccggactgcgcccggaaaccgccctggcacgacgcgccgggctgacgattaatcgcggcgtttgcgtcgatagttatctgcaaaccagtaatgccgatatttatgcgctgggcgattgcgcggaaattaacggtcaggtattgccgttcctccagccgattcaacttagcgcgatggtgctggcaaaaaatcttctcggcaataacacgccgctgaaactcccggcgatgctggtgaaaatcaaaacgccggaattaccgctgcatctggcaggcgaaacccagcgtcaggatttacgctggcaaattaataccgaacgccagggaatggtggcacgcggcgttgacgatgctgaccagcttcgcgcctttgtggtcagtgaggatcggatgaaagaggcatttggattgttgaaaacgttgtcgatgtaggcgagctacagtgccccaaatgtcggatgcggcgctgacgcgtcttatccgacctacagggaacacatgtgttgatcacataatacgtttatgtcgcatcctgcactgtcccaaaatgtcggatgcgacgctggcgcgtcttatccgacctgcggggatgaatatgtaggccggataaggcgtttacgccgcatccggcaatggtgtccaaatgcagcacgttttatccgttctggacttcccctgccaaccaacgcgccgcaacaataaccccctgccccagagacaacccgccatcgcccgcaggtaaactctgtggaaagagcaatgtgaaatcagcgagataatgcgccagacgtgcacgcagcaaacggttatgaataactccgccgctaaataccagcgtagtgataccccgcatcgtggcctgctcacgcatcaacgcggcaaaaccctgcgccagcgcatcatgaaacgcccacgcgcgttgattaaccggagcctgccagctcagccactgctgccagaaagtggcgagatccagttgattgtccaccagcggcatcgtcaccggatgcgtcactctgtggcacggagctgcgagtgcctccagagcacaagccgcttcaccttcataacttaacgtggctggcgcacagcccagcgccgccgctacggcatcgaacaaacgtccacacgacgatgccagcggcgcgttaattccacgctcaatagcccgcgccagcacgctccagttttgctgttgcacacttgccgtttcagagtaattctgccactccggcacaaagcgcaggcactgcgccagcaggtttcgccacggctgcttcgcagccaaatcgccccccggaagcgccaccgcgggcaagccgcccaggtgctggcattcacgatagttcacccgcaggcactcgcccccccataaagcgccgttctcccccataccaataccgtcgagcgtcaacgcaatgacatctccgccatccagaggccagaggtgttctgccagacacgccgctgcgtgggcatgatgatgcagtaccgtttgcgtcggcagattcatttcgcgcgcccactggctggagacatagcccggatgcgcgtcatgcacaacgtattgcggagtgaaatcgtagatgttttgcatcaggcgtaacgcttcgcgccactgcatctggatgccatcgtcacttaaatcgcccagatgctgactcaacaccgcttgttcgccgcgcaccaggctgaaggtgtttttcagatccgcaccgagacacagaacaggacggtgaatacggtggttaaagaagaaacctctgccgccacgacggctgacctcggcccacggatgcaatgcagcgtctgccagtggatttacgatccggcaaaaggcgagccaatgcaggacgttgcgccaggaacgccgtggagtgaagtcccggataacttcctgtgcccggaatgctctctcggcaaagacgtctttgacgaactggcatcggaggcaaaatgagcaacggcattgtgatcattggttcgggcttcgccgcccgccaactggtgaaaaatattcgcaaacaggacgccagtattccattaaccctgattgccgccgacagcatggatgagtacaacaaacctgacctcagccatgttatcagtcaggggcaacgtgccgacgaccttacccgccagacggcaggtgaatttgccgagcagtttaatctgcgcctgtttccgcacacctgggtaacggatatcgatgccgaagcccatgtggtgaaaagtcagaataatcagtggcaatacgacaagttagtgctggcaaccggtgccagcgcctttgtcccgccagtgcccgggcgtgagttaatgctgacgttaaatagtcagcaagagtatcgcgcctgtgaaacgcaactgcgggatgcccgacgcgtgttgattgtcggcggtggtttgattggtagtgaactggcgatggatttttgtcgggcaggcaaagcggtcacgctaatcgacaacgctgccagtattctggcgtcgttaatgccaacggaagtcagcagccgcttgcagcatcggttgacggagatgggcgttcatctgctgttgaaatctcagttgcagggactagaaaaaacagattctggcattctggcaacgctggaccgccagcgctgcatcgaagtggatgcggtaattgccgccaccggactgcgcccggaaaccgccctggcacgacgcgccgggctgacgattaatcgcggcgtttgcgtcgatagttatctgcaaaccagtaatgccgatatttatgcgctgggcgattgcgcggaaattaacggtcaggtattgccgttcctccagccgattcaacttagcgcgatggtgctggcaaaaaatcttctcggcaataacacgccgctgaaactcccggcgatgctggtgaaaatcaaaacgccggaattaccgctgcatctggcaggcgaaacccagcgtcaggatttacgctggcaaattaataccgaacgccagggaatggtggcacgcggcgttgacgatgctgaccagcttcgcgcctttgtggtcagtgaggatcggatgaaagaggcatttggattgttgaaaacgttgtcgatgtaggcgagctacagtgccccaaatgtcggatgcggcgctgacgcgtcttatccgacctacagggaacacatgtgttgatcacataatacgtttatgtcgcatcctgcactgtcccaaaatgtcggatgcgacgctggcgcgtcttatccgacctgcggggatgaatatgtaggccggataaggcgtttacgccgcatccggcaatggtgtccaaatgcagcacgttttatccgttctggacttcccctgccaaccaacgcgccgcaacaataaccccctgccccagagacaacccgccatcgcccgcaggtaaactctgtggaaagagcaatgtgaaatcagcgagataatgcgccagacgtgcacgcagcaaacggttatgaataactccgccgctaaataccagcgtagtgataccccgcatcgtggcctgctcacgcatcaacgcggcaaaaccctgcgccagcgcatcatgaaacgcccacgcgcgttgattaaccggagcctgccagctcagccactgctgccagaaagtggcgagatccagttgattgtccaccagcggcatcgtcaccggatgcgtcactctgtggcacggagctgcgagtgcctccagagcacaagccgcttcaccttcataacttaacgtggctggcgcacagcccagcgccgccgctacggcatcgaacaaacgtccacacgacgatgccagcggcgcgttaattccacgctcaatagcccgcgccagcacgctccagttttgctgttgcacacttgccgtttcagagtaattctgccactccggcacaaagcgcaggcactgcgccagcaggtttcgccacggctgcttcgcagccaaatcgccccccggaagcgccaccgcgggcaagccgcccaggtgctggcattcacgatagttcacccgcaggcactcgcccccccataaagcgccgttctcccccataccaataccgtcgagcgtcaacgcaatgacatctccgccatccagaggccagaggtgttctgccagacacgccgctgcgtgggcatgatgatgcagtaccgtttgcgtcggcagattcatttcgcgcgcccactggctggagacatagcccggatgcgcgtcatgcacaacgtattgcggagtgaaatcgtagatgttttgcatcaggcgtaacgcttcgcgccactgcatctggatgccatcgtcacttaaatcgcccagatgctgactcaacaccgcttgttcgccgcgcaccaggctgaaggtgtttttcagatccgcaccgagacacagcacagcaaaaggcgagccaatgcaggacgttgcgccaggaacgccgtggagtgaagtcccggataacttcctgtgcccggaatgctctctcggcaaagacgtctttgacgaactggcatcggaggcaaaatgagcaacggcattgtgatcattggttcgggcttcgccgcccgccaactggtgaaaaatattcgcaaacaggacgccagtattccattaaccctgattgccgccgacagcatggatgagtacaacaaacctgacctcagccatgttatcagtcaggggcaacgtgccgacgaccttacccgccagacggcaggtgaatttgccgagcagtttaatctgcgcctgtttccgcacacctgggtaacggatatcgatgccgaagcccatgtggtgaaaagtcagaataatcagtggcaatacgacaagttagtgctggcaaccggtgccagcgcctttgtcccgccagtgcccgggcgtgagttaatgctgacgttaaatagtcagcaagagtatcgcgcctgtgaaacgcaactgcgggatgcccgacgcgtgttgattgtcggcggtggtttgattggtagtgaactggcgatggatttttgtcgggcaggcaaagcggtcacgctaatcgacaacgctgccagtattctggcgtcgttaatgccaacggaagtcagcagccgcttgcagcatcggttgacggagatgggcgttcatctgctgttgaaatctcagttgcagggactagaaaaaacagattctggcattctggcaacgctggaccgccagcgctgcatcgaagtggatgcggtaattgccgccaccggactgcgcccggaaaccgccctggcacgacgcgccgggctgacgattaatcgcggcgtttgcgtcgatagttatctgcaaaccagtaatgccgatatttatgcgctgggcgattgcgcggaaattaacggtcaggtattgccgttcctccagccgattcaacttagcgcgatggtgctggcaaaaaatcttctcggcaataacacgccgctgaaactcccggcgatgctggtgaaaatcaaaacgccggaattaccgctgcatctggcaggcgaaacccagcgtcaggatttacgctggcaaattaataccgaacgccagggaatggtggcacgcggcgttgacgatgctgaccagcttcgcgcctttgtggtcagtgaggatcggatgaaagaggcatttggattgttgaaaacgttgtcgatgtaggcgagctacagtgccccaaatgtcggatgcggcgctgacgcgtcttatccgacctacagggaacacatgtgttgatcacataatacgtttatgtcgcatcctgcactgtcccaaaatgtcggatgcgacgctggcgcgtcttatccgacctgcggggatgaatatgtaggccggataaggcgtttacgccgcatccggcaatggtgtccaaatgcagcacgttttatccgttctggacttcccctgccaaccaacgcgccgcaacaataaccccctgccccagagacaacccgccatcgcccgcaggtaaactctgtggaaagagcaatgtgaaatcagcgagataatgcgccagacgtgcacgcagcaaacggttatgaataactccgccgctaaataccagcgtagtgataccccgcatcgtggcctgctcacgcatcaacgcggcaaaaccctgcgccagcgcatcatgaaacgcccacgcgcgttgattaaccggagcctgccagctcagccactgctgccagaaagtggcgagatccagttgattgtccaccagcggcatcgtcaccggatgcgtcactctgtggcacggagctgcgagtgcctccagagcacaagccgcttcaccttcataacttaacgtggctggcgcacagcccagcgccgccgctacggcatcgaacaaacgtccacacgacgatgccagcggcgcgttaattccacgctcaatagcccgcgccagcacgctccagttttgctgttgcacacttgccgtttcagagtaattctgccactccggcacaaagcgcaggcactgcgccagcaggtttcgccacggctgcttcgcagccaaatcgccccccggaagcgccaccgcgggcaagccgcccaggtgctggcattcacgatagttcacccgcaggcactcgcccccccataaagcgccgttctcccccataccaataccgtcgagcgtcaacgcaatgacatctccgccatccagaggccagaggtgttctgccagacacgccgctgcgtgggcatgatgatgcagtaccgtttgcgtcggcagattcatttcgcgcgcccactggctggagacatagcccggatgcgcgtcatgcacaacgtattgcggagtgaaatcgtagatgttttgcatcaggcgtaacgcttcgcgccactgcatctggatgccatcgtcacttaaatcgcccagatgctgactcaacaccgcttgttcgccgcgcaccaggctgaaggtgtttttcagatccgcaccgagacacagcacaggcggaacatttttaaagcccggaggcaaagccagcgcatccggcacatacccccgcgaacggcgcagcatttcgccgctttcgcgcaccaccgaatcatccatccgctgcacgatgtcgcggttatgtatcaagaatccgtcggcaatgccctgcaaatccgccagcgcctgttcgttgctgatagccggtggtttaccgctcaggttgccggaggtcatcaccagcgggcattgcagttcctgtaacagcaaatgctggagcgggttcgcaggcaacattaccccgacttcgttaaggccaggggcgatatcatcacaaagctcaggtacatattttttatccaccagcacaatcggcgcggcgggcgtggtaagcaactggcgcgcagcgtctggtaaatcgtcagccactggcaacatgaccgccagcggtttcgccgggcgatgtttgcgcgcccgaagtgtcgccaccgcgttactgttacgtgcatcgcaggcaagatgaaatccgccaatccctttgatggcgacaatgttgcccatttttaactgtgcgatagctgcctgtaatgccgcctcttgttctgcatgttcaccatgacttacccattcaagatgggggccacactccgggcaggccaccggctgggcgtggaagcgacgatcgagcgggtcacagtactctttgtcacaagccggacacagcggaaacgccgccatcacggtaaacgggcggtcgtaaggcatggcgcgaataatggtgaaacgcgggccacagtgggtacagttgataaacggataacgccagcgtcgttcgcctggggtattcatttcggcaaggcaagcagggcaagtggcggcatcgggaacaatttgcgtattcatgacgccacccgcgctctggcggatggtgaactcagtgggcagttgtgaccagataaacggctcacgctcgacgctatcaatacgcgccagtggcgggcagtgctgatgcaattgaacaagaaacgtttccggatcttccagcagccggacttctacgccatcgccgtcattacagacatcgccgtgaagatttaattgctgtgccagttgccagacaaacggacgaaaaccgacgccctgcactttgccacgaatacgcagttggacaccgcaagatgtgttttttgccattgagttattcccgccatcatgaattgcgtaacccgccctgccggacacgacagcgtcgcatccggcagtcacaggtcggcgataccgcccgcttcgtattctacgaatatttccgggaattcctttgataccagaacagttctgtaagatttttagaacatcagcgccgtgcggcggcgtttttctgcgctcagttgttcaagtttattacgatcgacacaaatcagcgcatgggtcgggcaagccgccatacacgccgggccgtcttcacgatggttgcacaggtcgcatttattggcttcggctttgtcagcccgtacattcagccctgcgccgctgttgcgaatcaccggacgcaccaccacttccatcgcaccatacgggcaagccacaacgcaggttttgcaaccaatacaacgttcctgcatgacatgaacaaaccctttatcacggctgatagcaccattcgggcagacgttagcgcacggtgcatcttcacactgacggcaaactgtcgccgtggaaatgttcacacctttaatgacatggatacgcggtaaaaatgtttccggggtcagcgatgcacagtcctgattttcctgatgagaaaccacgcacgctacttcacaggtacggcaaccaatacatttactcgcgtcagcaatgatgaaacggttcatcaaattctccagcaatgacagttaatgcgccgatacattcacaaatcatgccagtttttaatttactgttatttaaggaaattaaattctgtactacaggaaaaacgatgtcatcgacactagtgacgatgacatgtgatgacagtatttatcgttgccagtccacatctgggtacttttttccgacaagtcgttctggtggtataaaaaagtaattgccagtaacggggaggatttaagggaagcaaccgtgccggatacggcgtgaacaatgaccactttgtcagctatccatatgattgtattttgaggttcatcgcagattagcgatgaacctttattaaataatacaattccgactgaaataacaggtaaggatacaaaatgggttcatggggaatggaggctctcgaaagcgacgaagggctggatttgattaattgggtagaggaacaactgcaagatgattcgacctttgatgccgagtcaattgttcaacgcttaagccagcatgaagatttgttcggatttcagggagatgaagaatttctctacgataataatgttatcggtctcgtcgaacttatcattcaaaaagcagccggggaaaaaatcacatcgagtaaacaaattgatcaactcgacagttatcggctcacgtcgattttcagcaaaaaactctagggccgtttacaaacaatcgacgacacacatgagtggataatgctttttgaggggcgagcacgcgaaaaggcaaaagcatatctgattgagattactgataaattaagagtagtaaagacaacagcctgaatgacaaacaagggcgcgcaaaattaagaatctgcgccctttcaaagcccgacaggcgtagcgcatcaggcgatttagcgtctgccatcagtcaaagaaaccattccggcttaacgccaaatcgggctgaaagtgccttaatgtggggtatcgtcaaggatcgttgtccagacaagatctggctgaccagggatttagagccgatttcgttcttcaaatctgcataggtcagattatgttgatcaatcagcgtgcgaagtaacgccacaccaacaggcattgccgcaacggctttgtcgaactctgcaaacttttcgttgttgttttcatattctgcaatgcggctcgccagaaagtcgataagtggattggtgtcatcttcttcaatcaaatattcgaccagttccagtgcttcacgataatcatcttctgagtcactgcctcccagaaaggggactgcattgaccagttctcttgttgctttaacagcgcgtgcagcattagcagtcattctttgttctctctgtagtaacgtgtcagtttgtcatactctgcgtgattcgtgatgtgcttcacaaagaaccgcttattaacaaagtttatgtaggcaataaccctaagattgttcccgccgacatccagaacgtaccatttgttgcgatatttaaaattgtcgaggttgggaaaagccgttcgcatttcttctggcgtagaaaaatccgtttccttaataacccgatacaatgagtgtagagccagagcgtcgttaggatatttgcgcgcacactcttcaaatggcgctttagaaatgatgtgcatttttaagttttaacttccttatagtaagtaaacagccacatctgcgagttctatccttatatgttcggaacactatagcttatcaaatccaagttcacaatatgtaaacacttgcgcacgatataattactacaaaaatcctcatagccactctgcaaaaagtcagttctgattcaccccatcaagcacatcaccctttattaaacaacgctgtgtcagcgccagatctttcgtttgcgggttacgtccggcgacaggtttaatgacgagtttacggttggaggtataggtaaaacgcgtgagtgcggggtagcttaacttgccaaaccagccgtgaacgcgctgccatttggcctcttttacctgatacaaactggttatccagtaaccggaatcaaactgcatatccagcaattgcgtgtgaccattgccttgtaaatcaagcaaatcatcaacgccagtttcgtttgcggtgtaaaaaccatcgacctggaaaacacacgggcgaccttgctgattaaaggtcatcaggatcaaaaacgaggaaggcgccagcccgtttcccgaaacacctcgccagataaccaaatcctgaatgccattacgatcgaggtcagcacggtaaaattgcgcattacccgccatattttgcagcacacccacaggcacaaaccaggatttaccggcacggtccttagcggttaatcgccagtaatcctcttcatttggcatcttctcaagcgttacgcctgcaatgcccacttttctaaaatgccaggtttgctcggcatcataaggcagggttaagagaggtttcagcgcccgcttttgcgcgtattcgctgtcactcatcggtagatattcggtaaagctggtagcctgcgcaggcagcactaagctcaataaaaaagcgcacatccctgtcctgatgttcaattccctgaattccttactgaaaaactactcttcttccgccgctaactgcgcgaagccgccatttccttcccagccttccagccgctgatacaccgtttccaccgcatctttaatctgctgagtcatcgggtagtaaaagccgacgatatccggctggatgccaaggaaaatcacttcgccaatatcttctttcaactggtcgataagatagttcagcggcatgttatgggtagtcatcataaacatctcggcgatgtcagccgggtcgatgatgcggatctcgccagggtttagccccatatccgtggcgtcgacaataagcagccgtgtcgggcgcagttcgcgaatagcgacaatgtcgttttccggtgcgctaccgccgtcaatcactacccagttacctttcggcgcggcagcgcacttttccgccagtagcgggcctgcgccatcatcgcccatcatgctattgccaacacagagtaaaacgtcagtcacgcagtctcctcaccatcaaatagatggcgttttcctgatgaatatcatgcagcatacttaacagcattgtactccattccttctgctgcgaagtttgcgctgcccgggctttatcgaatgcgttggccagcatcggcacatggttaatgtcgatgacgatctcaccatatttcggcacgccttccattttgcggcgggcttcgctgcccgcctccagagtggcaatccatgccagatattcatcccacgggcaggtaagcgccgcttccaggcaatcgataaccccaaggtggtgaccaatcgccaggctgtaatagaccacctgctgcgcctcggcgggcgtagcatcgttctcatcaatgaatttacggctcagttgactgaacaccaccttttcactcatcggatacgcgcctcttcaacaacatgattcagatggctgacaatctcgttcagacgcggatcgttttccgcttccagccaacgtgcaacctgttcttcgccctgccctaactgtgtcaggaagtcatcggcaatctgacgaccgtaacgataacccgccagtcggcgtgcttcgcgatccactttcacgcgcagcggctgcaccatatcgccatgcagaatctccgccggttgttcatcctgctcacccggcccacgggcgtgaattttctgctccagcaggccgagcgccatcgcaaagccgtacagcgtggcggcaggcgttggcgggcaccccggaatgtagacatccaccgggacgattttatccgtaccgccccacacgcagtagagatcgtggaagatcccgccgctgttaccgcaggcaccgtaggagatacagattttcgggtccggcgcggactgccacgcacgcagcgcaggggatcgcattgcacgggtgaccgcgccggtaaacagtaaaatatccgcatgacgcggtgacggaacaactttaatgccgaagcgttctgcatcgaacagcggcgaaagcgtggcgaaaatttcgatttcgcaaccgttacagccgccgcagtccacgcgataaacgtaggcagaacgtttgatttttttcagtaacgacgccttcatgctggcgatggattcatccaccgtcatcgggaccggaatgccgttggcgtcacgggggcctaataaattgctcatcagatggcctctttcatatggcgagtcagttcaatacggtcggacggcaccaggcatttctggcgcttacattccgggcaagtctcaaagctttcgcggtggttttccgcgcggctgtcgccgttgtgcttaagcagcgcaatggcgtagtcgatctctttctggacggcgaaaggacgattgcagacgcggcagttgcacagcgcgaagcgggactgttgcaggaagtcttctttcttccacaccgccagttcgtattcttgcgacagtttgatcgccgctgtcgggcagacttcttcgcagcgcccacagaagatgcagcgcccaaggtcaaactgccacgccagctcaccagtggcgaggtcggtttcaaccgttaaggcgtttgacgggcaggcattgacgcaagccgcacagccaatgcactgctgcgggttctgctctggcttaccacggaagtttttatcaaccgcaatcggctccagcggataagacgaagtcgccgtgccggttttgatgacttttttgataaaggtaaacatggcgattccttatttcagcggcgagtttttacgctcaatgctgtaacgctcgagttctttgtacggcaccactttgctcttcttcttacgtacatcgaccacggtcatgcggtcggtacaggagtagcaagggtccaggctaccgataatcaacggcgcatcggaaacggtgttaccgcgcagcatgtagcgcagggtcggccagttcgcgtaggtcgccgcacggcagcgccagcggtacagcttctggttgtcgccggtcatgctccagtggatatcgtcgccgcgcggcgcttcggcaaagcccagcgcgaaacggtgcggaatgtaggtaaagccttccaccatcagcgggccgcccggcaggttatccagaccgtaatcgatcatattcagcgcggtatagacttcgttgatacgcactttcagacgggaaataacgtcgcagccctgctcgctgtggacttccattggcagcaggccataaccaacaaacgggtgatcggcacgggtatcacgggcgtgaccgctggcacgaaccatcgggccaacgttactgaagtcgcgagcgatttccgggtccagacgaccaatgccgacggtgcgttgttccatgttcggtgtgctcagcagcacatccaccagctcctgcacttcacgacgcatctgttgtgccagctggcgggtctggatcatgtcgtctttcagcagatcgcgacgaatcccgccgatcaggttcaggccgtaggttttacgtgcaccggtaaggatctctgccattttcatggaggtttcacgcacgcggaagaactgcataaagccggagtcgaagccggtaaagtgacaggccaggccgagattgagcagatgcgagtgcaggcgttctacctccagcagaatggcgcggatcatctgcgcgcgttctggcacctgaatacccatcgcgttttccaccgacgtggtataggcggtgctgtgagcaaagccgcagatcccgcacacacggtcagagaggaaggtcacttcgttgtaacccatacgggtttccgccagtttttccatgccgcgatggacgtagaacaggcggtagtcggcgtcgataatgttttcaccatcgacgaacagacggaagtgacccggttcgtcagaagtgacgtgcagtggaccaatcggcacgacgttgtttttcttgtcgcccagttcgttgatgaactcgtaggtttcagcatcggtagtcggtgccggacgctgacgataatccatgctgtctttacgcagaggataaagttcatccggccagtcatccggcagcaccagacgacgttcatccggcagaccaaccggaatcaaaccgtacatatcgcgcacttcacgctcgccccacaccgccgccggaacgcgcggcgtcacggaaggatactccggtttgttggcgtcaacttcgacgcgaaccgttacccaacacttggtgcccttctccatcgacagcacgtaataaacggcgtaatgaccattcagtttgcgttcgtcgttaccaaacagcaccgacagccaacccccttgtttgtagtagagaaactccaccacttccggcaggtagttcaccttcacggtgacggttagctgatctttggtctgccaggcgtggtccagcacgacgccaggaaatgcctcattcagcgcggcgagataatgttgacctaatttttcttcagacatgctcaaactctctttaatcacgccgccagcaaggagacgaacgctaaaaatgcaaagccaaacccagcccaggtaatgcgcggagtaatatcaagacgcagacgggccatgctgttttcgaacagcgcgataaccagtacgccgaccaccagtttgacgatggcaatcaccagcgccagcagcagcccaccgacggtgaaggtttccatttgtccccacggaataaacaccccgacgaacatctgcaacaccaccagctgtttcaggctgatgccccatttcatgacgccaaagccgctgccgctatactcagagagcggaccttcctgcaactcctgctcggcttccgccaggtcgaacggcagtttgcccatttcgataaaagtggcgaacgcacaggcacaaagcgccagcaccagcgggatgctctggctcagtggccagtgataaacggtgtcggtgatgttgctgatgttggtggaaccggcaacctgtgcggcgacccacagaccaagcagcagcatcggttcaaccaacacgccaagcatcgcttcacggctcgcgccgatagcggtaaacgggctaccggtatccagaccagaaatggcaaagaagaaacgcgcgatggcgaagagatacagtaaggtgatcaaatcgcccagttgcggcagcggagaaccgacggtcaccaccggcagcgcagtggcgatagtcagcatgacgcccaccatcacatacggcgtcaggcggaacacccagccggaggcatccgggccaacgctctgacgccccagcagtttgataatgtcgcgatactcctgcaacacgcccggcccgcgacggttatgcagacgggcacgcgccacacgggtaataccggagagcagcggcgcaacggcaaatagcaccagcgcctgaattaacggatataaaacactcattctcaggctcctcgtgaaacaataatcaccaccagcaccgccagttcaaccagcgccatccggcggaacagcaacgcactcccctcgcactgccagcccggcaccagcgacaccggattcaaccatttgcgtagtttcagcaccggcgcaaacgcctgtttcaccggcatggcaaaaccgtgagcggtaatcaccattgatttttcatgatcgtagccgcacacccaggccgcgccgcgggaacgcgacggcaaacgatcgcctttgcaaatcgccataatgatgaacggcagcagcgggcaggcaatcagcagcaacgtgatcatcggttgagaaacggtggtgttagcaggctccagcggcagaggtacagcagcagagagcatcggcagtagccacggcgcagcaacaccgccaattacgcagcaaatcgccagtgccactacgcttacgctcatcaggagcggcgcacaggtggcgttttcggcctctttggtacgcggcgcgccgaggaaagtaacgccataaactttcgccatacacatcaccgccagcgcaccggtaattgccagacccacggcgagcagcggcccgaacagacgggcaacaaacgcgccactattgctcagtttgaagaaggattgatagataacccattccccggcaaaaccgttcagcggcggcagcgcagccattgccatcagcccgactaacatggcgatggagataaccggcattttcttgccaataccaccgagtttttcgatatcgcgatgaccggtacggaaccagacgctccccgcaccaaggaacagtacgctcttgaacaggctatggttaatcagatggtacagaccaccaaccagaccaagggcaatcagcgccggttgttcgagcgcgatacccgttacgccagcgcccagccccagcaggataatgccgatattttccagggtgtggtaagccagcagacgttggatattgtgttccatcaacgcatacagaccgccgacgaatgcggtgatcatgccgagtaccagcagtacgatcccccaccacagcggtgcattaccgcccagtagtgacagagttaaaatgcccagcaggccaattttcatgactaccgtggaaaacagcgcggcagctggcgcagaggcgttggcatgtgcctgtggcacccagccgtgcagcggaataatcccggccagcaggccaaagccaatcacaccgagcagccagatatcggaaccgagcggcagctgttgcatacgcatatccagcaggcgcagatccagcgtaccgtaacgctgccacagcagccagcaggcaatcgccagcagcagagtgccaagacgccccagcgcaaaccacagtttgccctctttgctgttgctggtgaggaacaccgcacacagggccatgatttcggccattaccacgaacatgccgaggttgctggcgatgacggcacagacggcggcagccatcaacatattgatctgcaagccgttgcatttcacctgcgcgtggcgatgccagtcaatgttgtagaggctgacaaacagaccgcacagaccgagcgtaatcagccaaatcgcgttaagcggagagatttgcacatcgtagcttaccagcgacagcgcaccgctcacgccaaccgcgccagtcagcacagtgaagcccgcggctgccgtatacaggctacccaccgcgccgccaattccggctatccagccacttagcgctttttgaaaagaaaagagaaatgccagaacagcggcggcgacaaaccacgccacgccgctattgatcagggaaattgcgctcatttagcctctccactttgagcctgctgaaacaaggtgagatcgccaaagtccgtgttaaaagtcagctcacgcttacgtttgctgacgcgggcgatatcggtgttatccaccagatgcagggctttagtcgggcacatccgcacgcaggccggaccttgttcatcaaagctacaaaggtcacatttgacggcgatcgcgcgaatacctggcacccagtcaagcaatgtgctgacacgcgccggagcaggcggtgccggtggcgctttcggggtattggcgtttgccggaatatccagcggacggctgccggaaaattcaattgcgccaaacgggcaggcgataccacacagtttgcagcttacgcacagactttcattcaactgcacagcaccatcaacacgagtgatggcgttaaccgggcagaccaccgcgcagggtgcatcttcacagtgatgacagagctgcggcgcagattctttttcatttagcatcactcgcaggcgcggcattgattgcaggccgtgctggcgatgcgtctctgaacaggcagcctcacaagtgtggcagccgatacagagcgtggagtcagcaattacaaaacgattcaccaggcattcctcaggtgattgtcatttttgacgaaaacatgccgatgaaatgtcattttcgacactcatcgacacgcccatccccaaacaggcgtaacgcctgcaaaacgggcaaagcctcagctcatgctaccgggctttgtccctttaccagttggcttaaattcaccggcacattgttttcaatggcggtatataagctgtcgtaaacgccagcgattttttcgagatagtgttccaaaacttgttcgcgatcgcggatgttgaccttgccatcaatcatgccgtcaatgctcaactgcgcctgcgcaatccgctgtttgtcttcgccatcttttgtttcgacgtaatactcgatggtgtggctgttaaagccatccgccagggtgacgtaaatgcgaaaatgttcaaaaaggacgaaacagagttctttgtccggcgcgcagctcatggcgtgatgcaggcgcgctttcgataacgtgatcccctgaaccagcgaattgcagtagatgtgccactggtcctgtaggcgacgatgccgctgtgcgatgtaatcggctttctcgcttatttcccaaatagtcattgtcaggttacccgtttaacagagatgccagctttaagcattttctgtgccaacttttaattcattgttattaaagcgatttctaagctaaagatgaatttcgtcgccgtgtcgacgtgtcatttcgacatcatcgacattattcaccgcagggataatcaacactggcacaattattgcttgtagctggcaatagttaatgggaggcgatatgcacgaaataaccctctgccaacgggcactggaattgatcgaacagcaggccgcaaaacacggcgcaaaacgcgtaactggggtctggctcaaaattggcgcattttcttgtgtcgaaaccagctctcttgccttttgttttgatctggtttgccgcggcagcgtggcggaaggttgtaaactgcacctcgaagaacaagaggccgaatgctggtgtgaaacatgccaacagtatgtgacgctactgacccagcgcgtccgccgctgtccactgtgtcatggtgacatgctacagattgtggcagacgacggtttacagattcggcggatagaaatagaccaggagtgagcgatgtgtacaacatgcggttgcggtgaaggcaacctctatattgagggtgatgaacataaccctcattccgcgtttcgtagcgcgccatttgccccggcggcacgcccgaagatgaaaatcaccggcattaaagcgcctgaatttacccccagccagactgaagaaggcgacctgcattacggtcatggcgaagcgggcactcacgcgccgggcatgagccagcgtcggatgctggaagtcgaaattgacgtgctggacaaaaataaccgtctggctgaacgcaaccgcgcgcgctttgctgcccgcaagcaactggtgctcaacctggtttccagccctggttccggtaaaaccaccctgctgacggaaaccttaatgcgcctgaaagacagcgttccgtgcgcggttattgaaggcgaccagcaaaccgtgaacgatgccgcgcgcattcgcgctaccggcacaccagcgattcaggtgaacaccggtaaaggctgccatcttgacgcacagatgattgccgacgccgcgccgcgcctgccactggatgataacggtattctgtttatcgaaaacgtcggtaacctcgtttgcccggccagcttcgatctcggtgaaaaacacaaagtggcggtgctttccgttaccgaaggtgaagacaaaccgctgaaatatccgcacatgtttgccgccgcctcgctgatgctgctcaacaaagttgacttgctgccgtatctcaactttgacgttgagaagtgcatcgcctgcgcccgtgaagtcaatccagaaattgaaatcatccttatttccgccaccagcggcgaagggatggaccagtggctgaactggctggagacacagcgatgtgcataggcgttcccggccagatccgcactattgacggcaaccaggcgaaagtcgacgtctgcggcattcagcgcgatgtcgatttaacgttagtcggcagctgcgatgaaaacggtcagccacgcgtgggccagtgggtactggttcacgttggctttgccatgagcgtaattaatgaagccgaagcacgcgacactctcgacgccttacaaaacatgtttgacgttgagccagatgtcggcgcgctgttgtatggcgaggaaaaataatgcgttttgttgatgaatatcgcgcgccggaacaggtaatgcagttaattgagcatctgcgcgaacgtgcttcacatctctcttacaccgccgaacgccctctgcggattatggaagtgtgtggcggtcatacccacgccatttttaaattcggcctcgaccagttgctaccggaaaacgttgagtttatccacggtccgggttgcccggtgtgcgtactgccaatgggtagaatcgacacctgcgtggagattgccagccatccggaagtcatcttctgtacctttggcgatgccatgcgcgtaccagggaaacaggggtcgctgttgcaagcaaaagcacgcggtgccgatgtgcgcatcgtttactcgccaatggatgcgttgaaactggcgcaggagaatccaacccgtaaagtggtattcttcggcttaggttttgaaaccaccatgccgaccaccgccatcactctgcaacaggcgaaagcccgcgatgtgcagaatttttacttcttctgccagcacattacgcttatcccgacgctgcgcagtttgctggaacagccagataacggtatcgacgcgttcctcgcgccgggccacgtcagtatggttatcggcactgatgcctataattttatcgccagcgattttcatcgtccgctggtggtcgctggtttcgaaccccttgatctacttcaaggcgtggtgatgctggtggagcagaaaatagcggcccacagcaaggtagagaatcagtatcgtcgggtggtaccggatgccggtaacctgctggcgcaacaggcgattgccgatgtgttctgtgtcaacggcgacagtgaatggcgcggcttaggcgtgattgaatcttctggcgtgcacctgacgccggattatcaacgattcgatgccgaaacacatttccgcccggcaccgcagcaggtctgcgatgacccgcgtgcgcgttgtggcgaagtcttgacgggcaaatgtaagccgcatcaatgcccgctgtttggtaacacctgtaatcctcaaaccgcgtttggtgcgctgatggtttcctccgaaggagcgtgcgccgcgtggtatcagtatcgtcagcaggagagtgaagcgtgaataatatccaactcgcccacggtagcggcggccaggcgatgcagcaattaatcaacagcctgtttatggaagcctttgccaacccgtggctggcagagcaggaagatcaggcccgtcttgatttggtacagctggtagcggaaggcgaccgtctggcgttctccaccgacagttacgtcattgacccgctgttctttcctggcggtaatatcggcaagctggcgatttgcggcaccgccaatgacgttgcggtcagtggcgcaattccgcgctatctctcctgtggctttatcctcgaagaaggattgccgatggagacactgaaagccgtagtgaccagcatggcagaaaccgcccgtgcggcaggcattgccatcgttactggcgataccaaagtggtacagcgcggcgcggcagataaactgtttatcaacaccgctggcatgggcgcaattccggcgaatattcactggggcgcacagacgctaaccgcaggcgatgtattgctggttagcggtacactcggcgaccacggggcgactatccttaacctgcgtgagcaactagggctggatggagaactggtcagcgactgcgcggtgctgacgccgcttattcagacgctgcgtgacattcccggcgtgaaagcgctgcgtgatgccacccgtggtggtgtaaacgcggtggttcatgagttcgcggcagcctgcggttgtggtattgaactttcagaagcggcactgccggttaaacctgctgtgcgcggcgtttgcgaactgctgggactggacgcccttaactttgccaacgaaggcaaactggtgatcgccgttgaacgcaacgcagcagagcaagtgctggcggcgttacattcccatccattgggaaaagatgcggcgctgattggcgaagtagtagaacgtaaaggtgttcgtcttgccggtctgtatggcgtgaaacgaaccctcgatctaccgcacgccgaaccgcttccgcgtatatgctaataaaattctaaatctcctatagttagtcaatgaccttttgcaccgctttgcggtgctttcctggaagaacaaaatgtcatatacaccgatgagtgatctcggacagcaagggttgttcgacatcactcggacactattgcagcagcccgatctggcctcgctgtgtgaggctctttcgcaactggtaaagcgttctgcgctcgccgacaacgcggcgattgtgttgtggcaagcgcagactcaacgtgcgtcttattacgcatcgcgtgaaaaagacacccccattaaatatgaagacgaaactgttctggcacacggtccggtacgcagcattttgtcgcgccctgatacgctgcattgcagttacgaagaattttgtgaaacctggccgcagctggccacaggtgggctataccccaaatttggtcactattgcctgatgccactggcggcggaagggcatatttttggtggctgtgaatttattcgttatgacgatcgcccctggagcgaaaaagagttcaatcgtctgcaaacatttacgcagatcgtttctgtcgtcaccgaacaaatccagagccgcgtcgttaacaatgtcgactatgagttgttatgccgggaacgcgataacttccgcatcctggtcgccatcactaacgcggtgctttcccgcctggatatggacgaactggtcagcgaagtcgccaaagaaatccactactacttcgacattgacgatatcagcatcgtcttacgcagccaccgtaaaaacaaactcaacatctactccactcactatcttgataaacagcatcccgctcacgaacagagcgaagtcgatgaagccggaaccctcaccgaacgcgtcttcaaaagtaaagagatgctgttgattaatctccacgagcgggacgatttagccccctatgaacgcatgttgttcaacacctggggcaaccagattcaaaccttgtgcctgttaccgctgatgtctggcgacactatgctgggcgtgctaaaactggcgcaatgcgaagagaaagtctttaccactaccaatctgaatttactgcgccagattgccgaacgtgtggcaatcgctgtcgataacgccctcgcctatcaggaaattcatcgtctgaaagaacggctggttgatgaaaacctcgccctgaccgagcagctcaacaatgttgatagtgaatttggcgagattattggccgcagcgaagccatgtacagcgtacttaaacaagtggaaatggtggcgcaaagtgacagtaccgttctgatcctcggtgaaactggtacaggtaaagagctgattgcccgcgcgatccataatctcagtgggcgtaataatcgccgtatggtcaaaatgaactgcgcggcgatgcctgccggattgctggaaagcgatctatttggtcatgagcgtggggcttttaccggtgccagcgctcagcgcattggtcgttttgaactggcggataaaagctcactattcctcgatgaagtgggcgatatgccgctggagttacagccgaagttgctgcgtgtattacaggaacaggagtttgaacgtctcggcagcaacaaaatcattcagacggacgtacgtttaattgccgcgactaaccgcgatctgaaaaaaatggtcgccgaccgagagttccgtagcgatctctattaccgcctgaacgtattcccgatccacctgccgccactacgcgagcgtccggaagatattccgctgctggcgaaagcctttaccttcaaaattgcccgtcgtctggggcgcaatatcgacagcattcctgccgagacgctgcgcatcctgagcaacatggaatggccgggcaacgtgcgtgagctggaaaacgtcattgagcgcgcggtattgctaacacgcggcaacgtgctgcagctgtcattgccagatattgctttaccagaacctgaaacgccgcctgccgcaacggttgtcgcccaggagggcgaagatgaatatcagttgattgttcgcgtgctgaaagaaacaaacggcgtggttgccgggcctaaaggcgctgcgcaacgtctggggctgaaacgcacgactctgctgtcacggatgaagcgactgggaattgataaatcggcattgatttaacagatgtggttatactcgatcaacattcaatgaaaggaggcagtatggcagtttcagcaagaaatcaattaaccggaacagttagcgcagtagcaatgggcgctgtgaatgatgaagtagaactgacgctggcaggtggtgcaaagctggtggcaattgtgactcacagcagccagcaagcgctgggtctggcgaaagggaaagaagcgattgccctgattaaagccccgtgggtcacgctggcaacggaagactgtggactgaaattctctgctcgcaaccagtttgctggcagcgtgtcgacaatcaccgaaggcgcagtgaacgccactgtccatatcaaaacggatgcgggttttgaaattgtggcagtggtaacaaatgaaagtcaggatgaaatgaaactcaccactggctcgcgcgttattgcattgatcaaagcatcagccatcctgattgccaccaaagcgtaagcgccgtatttgccggagagtatggctctccggcagatttatttctttggacgatatttttctggcaactccggcaccggacgcttgtcatcgatgagatgacgcacggttaagatcggatgacgccacagcattctcggcccggcccaacgcataatctgtttcatctcttcacgctttgcaggctggtaacagtgcaccggacactgcttacaggctggtttctcttcgccgaacacacatttatccagccgctttttcgcgtaagcaaacaacgcctcgtaatgctccggctctgctgacgcctgcgggcatttcgcttgataaagatcgatcatttttttaatcgtcagtttttcacgagagatacgcttgccggacatgctgcctccatactcttaaggtgcatttatattacaacttaattttaaaggggactatgtctctgaaggaggaggtttcttcaaccgacgaatttggcgatcttgtttcatcgtcatcacgcaaaagctgcaaagcagcatttttcgcggaaccgacatcaagaactcacctttcgcgtcttcccctgaaatgattaactccggtatcatgtgcgccttatgtgattacaacgaaaataaaaaccatcacactacatttaacatcagggagccggacttaaccccatgagtacaatagaaaatttcgacgcccatacgcccatgatgcagcagtatctcaagctgaaagcccagcatcccgagatcctgctgttttaccggatgggcgacttttatgaactgttttatgacgacgcaaaacgggcgtcgcaactgctggatatttcactgaccaaacgcggtgcttcagcgggagagccaatcccgatggcggggattccctaccatgcggtggaaaactacctcgccaaactggtgaaccagggcgaatcggttgctatttgtgaacagattggcgatccggcgaccagcaaagggccggtcgagcgcaaagttgtccgtatcgttacgccgggcaccatcagcgatgaagcgctgttgcaggaacgtcaggacaacctgctggcggctatctggcaggacagtaaaggtttcggctacgcaacgctggatatcagttccggtcgttttcgcctgagcgaaccggcggaccgcgaaacgatggcggcagaactgcaacgtacgaatccagcggaattactgtatgcggaagatttcgccgagatgtcgctgattgaaggtcgccgcggcctgcgtcgtcgcccgctgtgggagtttgaaatcgacaccgctcgccagcaattgaacctgcaatttggcacccgagatctggtcggttttggtgtggagaacgcaccacgcggactttgtgctgccggttgtctgttgcagtatgcgaaagatacccaacgcacgaccctgccgcatattcgttctatcactatggaacgtcagcaggacagcatcattatggatgccgcgacgcgtcgtaacctggaaattactcagaacctggccggcggtgcggaaaatacgctggcttccgtactcgactgcactgtaacgccgatgggtagtcgtatgctgaaacgctggctgcatatgccagtgcgcgatacccgcgtgttgcttgagcgccagcaaactattggcgcattgcaggatttcaccgccgagttacagccggtactgcgtcaggtgggcgacctggaacgtattctggcgcgtctggcgttgcgtaccgctcgcccgcgcgatctggcccgtatgcgtcacgctttccagcaactgccagagttgcgtgcgcagttagaaaatgtcgatagtgcaccggtacaagcgctgcgtgagaagatgggcgagtttgccgagctgcgcgatctgctggagcgagcaatcatcgacacaccaccggtgctggtacgcgacggtggtgttatcgcatcgggctataacgaagagctggatgagtggcgcgcgctggctgacggcgcgaccgattatctggagcgtctggaggtccgcgagcgtgaacgtaccggcctggacacgctgaaagttggctttaatgcggtgcacggctactacattcaaatcagccgtgggcaaagccatctggcaccaatcaactacatgcgtcgccagacgctgaaaaacgccgagcgttacattattccggagctgaaagagtacgaagataaagttctcacctcaaaaggcaaagcactggctctggaaaaacaactttatgaagagctgttcgacctgctgttgccgcatctggaagcgttgcaacagagcgcgagcgcgctggcggaactcgacgtgctggtgaacctggcggaacgggcctataccctgaactacacctgcccgacctttattgataaacctggcattcgcattaccgaaggtcgccatccggtagttgaacaagtactgaatgagccgtttatcgctaacccgctaaacctgtcgccgcaacgtcgcatgttgatcattaccggtccgaacatgggcggtaaaagtacctatatgcgccagaccgcgttgattgcgctgatggcgtatatcggcagctacgtaccggcgcaaaaagtcgagattggcccgattgaccgtatctttacccgcgtaggtgctgcggatgatctggcttccgggcgttcaacctttatggtggagatgaccgaaaccgccaatattttacataacgccaccgaatacagtctggtgttgatggatgagatcgggcgtggaacgtccacttacgatggtctgtcgctggcgtgggcatgtgcggaaaatctggcaaataagatcaaagcgttgacgctgtttgctacccactatttcgagctgacccagttaccggagaaaatggaaggcgtcgccaacgtgcatctcgatgcactggagcacggcgacaccattgcctttatgcatagcgtgcaggatggcgcagcgagcaaaagctacggcctggcggttgcagctctggcgggtgtgccaaaagaggttattaagcgcgcacggcaaaaactgcgtgagctggaaagcatttcgccgaacgccgctgctacgcaagtggatggtacacaaatgtctttgctgtccgtaccggaagaaacttcgcctgcggtcgaggcactggaaaacctcgacccggattcactgactccgcgtcaggcgctggagtggatttatcgcttgaagagtctggtgtaataataattcccgatagccttttgctatcgggaatattaacgacaactgacgaatcaaataaaaataccctgtataataggaaaacttattttacagggtaaaaccatgccatctacgcgctatcaaaaaatcaatgcccatcactatcgccatatatgggccgttggtgatattcatggtgactatcaattattacaatcccgcttacatcaactctctttttgtcctgaaaccgacttacttatttctgtcggcgataacattgatcatgggccggagagtcttaacgtgctgcgcctgttaaaccagccctggtttacatcggctaaaggcaaccacgaagcgatggcgcttgaggcattcgaaactggcgatggaaatatgtggcttgccagcggtggtgactggtttttcgatttaaatgattcagagcaacaagaggcaatagatctgttgctgaaattccatcaccttccacatattattgaaatcactaacgacaccataaaatatgtcatcgcacatgcagattatccggggaaggagtatcagtttggcaaagaaatagcggagagcgaattactctggcctgttgatcgtgtgcagaaatcacttaatagcgaattacaaaaaataaacggcgccgacttctttatatttggtcatatgatgtttgataacattcagacgttcgctaaccagatttatatagataccggatcgccgaaaagcgggcggctgtcattttataaaataaagtagtctcatgcttcttctgtgaagcatgagtaacccggcgttattgcaggtcattattcatttttcgctaccagcaaagagagatccagcttcgccagcgcgcggctggcactctccggcagaccatcgtcagtaatgatctgatcaaactcgcttaatggtaacgccagccatgtcgccacctgtccatatttcgtcgcatcacagaccaaaactcgctggcggctggcactggcaatcgcccgtttcaccgtgactttatcttctgctggcgtagagatcccccgcacactccatgacgatgcagaaataaaagcctgatcaatcatcaggctacgcagcatggtcgcagcggcttccccaacacaggaacggttttcccgacacactgcgccgccagtgtgaataattgtgcaattactgttgtcgagcaagtagtccgcaataacgaagtcgttagtaaccactgtgagtggctccatgtgagtcagatgctgtgcaatcgctaacgtggtcgttcccgcatccagatagatacaacgtcccggctgaacaagacttgccgccagcttgccaatagccgctttttgcgtcattgccagcgcagtttttacctgatgagaaggttcatgtgccacgcgtcccggagactggacgcccccggacaccaacacaacggctccctgctgctccagtttttgtaaatcccgacgaatggtcatatgtgacacattcattctgtccgttagttcagcaatactaacaatgcctttttcagctaccatctcaaggatgatttggcgacgctctacgggtatcaacttttgctccttcctttgtcctgctgacattctacgctatttgcctgcgaaacgtgcgcggcgcaactaacgcttagttcacataaaataacacgcaatgttaatttttgtgaatcagctcaccatatcgttatctttccgcgcttatattcacaacatcaaacaaaatatcacttaaattaacaaggagagcagatgaaaacgggatcggagtttcatgtcggtatcgttggcttagggtcaatgggaatgggagcagcactgtcatgtgtccgcgcaggtctttctacctggggcgcagacctgaacagcaatgcctgcgctacgttgaaagaggctggtgcttgcggagtttctgataacgccgcgacgtttgccgaaaaactggacgctctgctggtgctggtggtcaatgcgacccaggttaaacaggtgctgtttggtgaaaaaggcgttgcacaacatctgaaacccggtacggcagtaatggtttcttccactatcgccagtgctgatgcgcaagaaattgctaccgctctggctggattcggtctggaaatgctggatgcgccggtttctggtggtgcggtaaaagccgctaacggtgaaatgactgtcatggcctccggtagcgatattgcctttgaacgactggcacccgtgctggaagccgttgccggaaaagtttatcgcatcggttcagaaccgggactgggttcgaccgtaaaaattatccaccagttgttagcgggcgtacatattgctgccggagccgaagcgatggcgcttgcagcccgtgcggggatcccgctggatgtgatgtatgacgtcgtgaccaatgccgccggaaattcatggatgttcgaaaaccggatgcgtcatgtggtggatggcgattacaccccgcattcagccgtcgatatttttgttaaggatcttggtctggttgccgataccgccaaagccctgcacttcccgctgccattggcctcaacagcattgaatatgttcaccagcgccagtaacgcgggttacgggaaagaagacgatagcgcagttatcaagattttctctggcatcactctaccgggagcgaaatcatgatcaagattggcgttatcgccgatgattttaccggcgcgacggatatcgccagttttctggtggaaaacggtctaccaacggtacaaattaacggtgttccaacaggtaaaatgccggaagcaatcgacgcactggtgatcagcctgaaaacgcgctcctgtccggtggttgaagccacacagcaatcgctggcggctctgagctggttgcaacagcaaggttgcaaacagatctatttcaaatactgctctactttcgacagtacggcgaaagggaatatcggcccggttaccgatgcattaatggatgctctcgacacgccgtttacggtcttctctccggccctgccggtcaacggacgtacggtttatcaggggtatttgttcgtaatgaatcaactgctggccgaatccgggatgcgccatcacccggtaaatcccatgaccgacagctatcttccccgtctggttgaatcgcaatccacagggcgctgcggcgtcgtttcagcacatgttttcgaacaaggtgtgaaagccgttcgtcaggagctggctcgcttacagcaagagggctatcgctacgcggtgcttgatgcgctgaccgaacaccatctggaaattcagggggaagccttgcgcgatgccccactggtaacgggcggttctggtctggccattggcctggcccggcagtgggcgcaagaaaacggtaaccaggctcgcgaagcagggcgtccgctcgctgggcgcagcgtagtgctctccggttcatgctctcaaatgaccaaccgccaggtggcacattaccgtcaaattgcaccagcccgtgaggttgatgtggcacgctgcctctcaaccgaaactctggccgcttatgcacacgagctggcagagtgggttctgggccaggaaagtgtacttgctccactggtttttgccaccgccagcactgacgcattggcagcaattcaacagcaatacggtgcacaaaaagccagtcaggcagtggaaacactgttttctcaactagcggcgcggttagcagcggaaggcgtgacacgctttattgtcgcaggcggtgagacctccggcgtagtcacacagagcctgggcataaaaggttttcatattggcccaaccatttcccccggcgtgccgtgggtaaacgcactggataagcctgtctcactcgcccttaaatctggcaacttcggtgatgaagcctttttttcacgagcccaaagagagtttttatcatgagcgatttcgcaaaagtagagcagtctttgcgagaggagatgacgcggattgccagttcattctttcagcgcggatatgcaactggttcggctggcaatctgtcgctgcttttacctgacgggaatttactggcgacaccgacaggttcatgcctgggcaatctcgatccacagcggctttccaaagtcaccgcggatggcgaatggttaagtggtgacaaaccctcgaaagaggtgctctttcatctggcgctgtatcgcaacaatccgcgctgtaaagcggtagtgcatttgcacagtacgtggtcgacggcgctttcctgcctggaagggctggacagcaataacgttattcggccgttcacaccatacgtggtgatgcggatgggtaatgtcccgctggtgccctattaccgaccgggcgataaacgcatcgcacaggatctggcggaactggcagcagacaatcaggcttttttactggcaaatcatggcccagtggtttgcggtgaaagcctgcaagaagccgccaacaatatggaagagctggaggaaacggcaaagctgatttttattctcggtgaccgcccgatccgttatctgaccgcaggtgaaattgcggaattaaggagttaatgcaatgcctcgttttgcagctaatttatccatgatgttcaccgaagtgccttttattgaacgcttcgccgcagcgcgaaaagccgggttcgatgctgtggagtttctgtttccctatgactactccccccagcaaatccagcagcaactggtgcaaaaccacctgacgctggcgctgttcaataccgctcccggagatattaatgcgggagaatggggattatccgcccttcccggacgtgagcacgaagcacgcgcagacatcgacctggcactggaatatgcattggcgctcaattgtgaacaagtccatgtgatgtcaggcgtcgtgcccgctggcgaagatgctgaacggtaccgggcagtatttattgataatctccgctacgctgccgaccgctttgcgccacacggcaagcgaatattggttgaagcactcagccccggcgttaagcctcattatctcttctccagccagtatcaggcactggctattgttgaagaggttgcgcgagataacgtgtttattcaactagatactttccatgcacaaaaagtagatggcaacctgacacatttaatccgcgactacgccgggaaatatgcgcacgtacaaattgccggactacctgatcgacatgaaccggacgatggagaaatcaactatccgtggctgttccgcctgttcgatgaagtgggatatcagggctggatcggttgtgaatacaaacctcgtggcctcaccgaagaagggcttggctggtttgacgcctggcgctaattcgctcaatccctaattacaacgtacccatacatccccccatctacggatggggtaggttaactataactttcagacagggtttcccatgtccacaattacattgttatgcattgcgttagctggcgtaatcatgctgttgctactggtcatcaaggcaaaggtacaaccattcgttgctctgctcctcgtcagcctgttagtcgcacttgcggcgggtataccggcgggcgaagtgggtaaagtgatgatcgccgggatgggcggtgtgcttggttccgtcactattattattggtctgggcgctatgctggggcgtatgatcgaacactctggtggtgcagagtcactggctaattatttcagtcgcaagttaggtgacaaacgaactatcgctgcgctgactctggcagcgttcttcctcggtattcccgtcttctttgatgtcggctttattattcttgcgccaatcatttacggttttgccaaggttgccaaaatatcaccactcaaatttggcctgcctgtcgctgggatcatgctcactgttcacgtggcggtaccgccgcatccaggccctgtcgccgcagcggggttactccacgcagacatcggctggctaaccatcatcggtattgcgatttctattcccgtagggattgttggctactttgcagcgaaaataatcaataagcgccaatatgcgatgtcggtcgaggtactggaacagatgcaactggctccggccagtgaggaaggcgcgacaaaattaagcgataaaataaatccaccgggcgtcgcgctggtcacctcgctaattgttattcctatcgcgattatcatggcgggtacggtttctgcaacactgatgccgccttcgcatcccctgcttggtacgctacagttgataggctcaccaatggtagctctaatgattgcgctggtgctggcattctggttattggctttacgtcgcggctggagcttacaacacaccagcgacattatgggctctgcccttcccactgcggcggtagtgattttggttactggtgctggaggggtatttggcaaagtgctggtggaatcgggcgtcggtaaagcccttgccaacatgttacaaatgattgacctgcctctgttaccagccgcatttattatttcactggcgctgcgtgcatcgcaggggtcagcaaccgtagcaatcctgacaaccggcgggttactctcagaagcggtgatgggattaaatccgattcagtgcgtattggtgacgctggcagcctgctttggtgggcttggcgcgtcacatattaatgactcagggttctggattgtgaccaaatatctggggttgtcggtagcagacggtctgaaaacctggacagtgttaacgaccttcttcctcggtattcccgtcttctttgatgtcggctttattattcttgcgccaatcatttacggttttgccaaggttgccaaaatatcaccactcaaatttggcctgcctgtcgctgggatcatgctcactgttcacgtggcggtaccgccgcatccaggccctgtcgccgcagcggggttactccacgcagacatcggctggctaaccatcatcggtattgcgatttctattcccgtagggattgttggctactttgcagcgaaaataatcaataagcgccaatatgcgatgtcggtcgaggtactggaacagatgcaactggctccggccagtgaggaaggcgcgacaaaattaagcgataaaataaatccaccgggcgtcgcgctggtcacctcgctaattgttattcctatcgcgattatcatggcgggtacggtttctgcaacactgatgccgccttcgcatcccctgcttggtacgctacagttgataggctcaccaatggtagctctaatgattgcgctggtgctggcattctggttattggctttacgtcgcggctggagcttacaacacaccagcgacattatgggctctgcccttcccactgcggcggtagtgattttggtgctggaggggtatttggcaaagtgctggtggaatcgggcgtcggtaaagcccttgccaacatgttacaaatgattgacctgcctctgttaccagccgcatttattatttcactggcgctgcgtgcatcgcaggggtcagcaaccgtagcaatcctgacaaccggcgggttactctcagaagcggtgatgggattaaatccgattcagtgcgtattggtgacgctggcagcctgctttggtgggcttggcgcgtcacatattaatgactcagggttctggattgtgaccaaatatctggggttgtcggtagcagacggtctgaaaacctggacagtgttaacgaccattctcggttttaccggattcttaattacctggtgcgtatggctcgtcatctaataatccagataagatatgatgtatcgtttaagtgcctgataagggtgtaatgtatgccaatattaacctcggtaatatctcgctaccgaggttaattttcactttgcaatataattacagtctcttgcaagttgattttatcttagtaataagaaccgaccaatcttattgccatttcgatattagcaggcatagatgcgtcgtagccatacatatggccatatttcggacgtaatacttcagttactttcttaataattgcttcgcgctgggctcgcgcaaaatcagcatgattatttgccgttttattcataaatttaccaaaactttcttcttttctgactttaattgtcgtatcccgaagatcattaagaaactggcgttgaaatttaaaatcatcgtgtgaaccaatattaccatgcccgccaataaaatatttccagtcaagcatttcaacctgacgcaaattactgtcatggtaaaccaacgtatccgatacggcgaagcccatcatcggcagttggtcaggattcaggagatccgggctgtgagctactttttcctgttttagcaaccatacagaatggtcgtcggtatgtcctgctttaacaaatcggtgtaattcaatggtctgcttttcaaatttaaactggtcatcttttttacttaaaacctgagtggcgacgggtaagcgactgttcataaattgcattttttcagcagtggctttactggcaataatacgcagattcacgccttctttcttcgcctcatcgttccaaaatggactatcgccaatgtgatccacatggtaatgagaataaaccagcgctgttacgggtaatggagtcacatcacgaattgcctgtaataaatatttaccgcgaccctccggagcatcaaacagcaaaacccctttgtctccgacataaaacgtagtggaataaaaatagcgttgaacataataagttctctcgccaattttttgtaaaatataaggctgagacatatttctttcaaaaaggttattgagtttatcgcttggcgatattattttttccgctgaaggttcaacataacttgcattaactgtagacgaatttgcagtcgaaatttccgtttgagcaaaaatactaccagatataagagaagaggctagaattgtatatattttaatgccttgcatacgtagtcctttattaatgtgttgttgatttatagcatctctgaacagactgttattttagatattactacgttacgagattcatttttcttcgaatattatgtttatctcattcaaaaaatatgttcatcatttgatggtttaaataatatctgcaaggcataatactccacatctttaaaacctgcctcaaaaaatcattcattagtaaaaaggatatttatatgcaaaacatagctgtggtttattattcaggatatggtcacactaaactggttgctgaaaaagtggcacaaggcgcccatgcagatttaatttcgattgataacgaaggaaatatcactgagcaggagtgggaaaaactggacgcagccgatgccattatcttcggtgctcccacctatatgggcggtgcgccatggcaattcaagaaatttgctgatgccagttccaaagcgtggtttacacgtaaatggcaggataaagtcttcgggggtttcaccaacagcgccagcctgaatggcgataaacaagttacgctgatctatctgcaaacgctggcttcacagcatggcggtctgtgggtgagtttaggtcaggctcctgccaatgtgcttgcgtcaaccagggaagatgtaaacaatctgggcggttcagtcggtttgctggtgcaatctccagccgatgcgggtgcagaccaaatccctacgggcgatctggatacagccgtgaaatatggtgaacgcgtggcgacaattactgtgcgcttaaaatgatgattgccaaatgtgacgctgacgcgtctatccggtcttctacatctaaaaagtgccgtcccctggtcagtcagataaagttttaacgctgtacccgataacagttcaacatgtaccatgtaccaaaagaaaaaaagccagcctcgcttgagactggcctttctgacagatgcttacttactcacggaacagcgcttcgatattcagcccctgcgtttgcaggatttcgcgcaaacggcgcaggccttcaacctgaatctggcgaacacgttcacgggtgaggccaatttcacgacctacatcttccagtgttgccgcttcgtaccccagcaaaccgaatcgacgtgccagtacttcacgctgtttggcgttcagctcgaacagccatttgacgatgctctgcttcatatcgtcatcttgcgtggtatcttccggaccattctctttttcatcggccaggatgtccagcaacgctttttcggaatcaccacccagcggggtgtctaccgaggtaatgcgctcgttaagacgaagcatacggctgacgtcatcaactggcttatccagttgctctgcgatctcttccgcacttggttcgtggtccagcttatgggacaactcacgtgcggttcgcaggtaaacgttcagctcctttacgatgtgaatcggcaaacgaatagtacgggtttggttcataatcgcccgttcgatcgtctggcgaatccaccaggttgcgtatgttgagaagcggaaaccacgttccgggtcaaacttctctactctaccgcgcggatcagccccaggttgccctcttcgatcaggtccagcaacgccagaccacgattgccataacggcgggcaatttttaccaccagacgcaagttactctcgatcatccggcggcgagaggcaacatctccacgcagtgcgcgacgcgcaaaataaacttcttcttcggccgttaacagtggtgaataaccaatctcaccaaggtaaagctgagtcgcgtccagcacacgctgtgtggctccctgcgataacagttcctcttcggccaaatcgttatcactgggttcctcttctactaaggccttttcgtcaaaaacctcaactccgttctcatcaaattccgcatcttcatttaaatcatgaactttcagcgtattctgactcataaggtggctcctacccgtgatcccttgacggaacattcaagcaaaagcctggttccgccgatttatcgctgcggcaaataacgcagcgggtttacggatttccccttgtaacgaatttcaaaatgcaagcgtgttgaactggttccggtgctacccatggttgctattttttgccccgccttcacttcttgttgttcccggaccagcattgtgtcgttatgggcgtaggcactcaggtaatcatcattatgtttgatgataatcagattaccgtagccgcgcagcgcgttaccggcataaacaacgcggccatccgcggtcgcgataattgcctgtcctttgctgcctgcgatatcaatccccttgttgcccccctcagaagcgccaaaggtttcgatcactttgccctcagtcggccagcgccaggtggagataggcgtactggttgatgtactgctgacaatcggctcggttgtgcttgctgttggtaccgttacaggcgctgtgaccgtggtcgcagttggcttgttgttcggcaacattttgttagcactctgttcacccgaagactcagaatacgtaattgtcggttgcgacgcaacagcaacggtggaattttgtgcaggcttgatcacaactccttgctctgctgcgtcggcctgggtaatggcatttccgcctgtgattggcgtaccggaagcattacccacctgtaaggtctgaccgacgttcagcgcgtatggtgcctgaatattgttgcgctgagcaaggtcacggaaatcgttgccagtaatccaggcgatataaaaaagcgtgtcgccttttttcacggtgtatgtactgccgctataactgcctttcggaatgttcccatactgacggttgtagacgattcgtccgttttccatctgtaccggctgctgagctactggctgcataggctggatttgcggttgttgagtagcctgaatttgtggctgctgtaccggctgaatttgcggttgctgcgctgtagacgtcgtccccattttcggcggcggcgtaatcaacataccagaattggtatttgcgggcgcattgccattaacggagctgaccggtgccggtggatttgaagtgtcagaacagcctgccagccatagcgaaaccagtgacaatgccgcaatgcggcgaacggtgaattttgggcttcccgcgctcatttatcccccaggaaaaattggttaataaccagtgacataattaccgtgcaaggcaccatactgaacactggaaaagatgttcacgatacgctgacctgcggcaaaataaccaggaaaaatccaggtatttcctcacgctttaagccagctcacccttcactaaagggacaaagcgcacggcctccacggtatcgataataaattcgcctccccgacgacgcacccgtttcaaatactggtgctcctcccctacgggtaagacgagaatcccgccttcgtccagctgcgtcattagcgcagttggaatttcaggcggtgccgccgtaacaatgatagcgtcaaacggcgcgcgtgcctgccaaccttgccatccatcgccatgacgggttgaaacattatgtaaatcaagatttttcaggcggcgacgcgcctgccactgcaagcctttaatccgttcaaccgagcaaacatgttggacaagatgcgccaggattgcagtttgatatcccgaaccagtgccaatttccagcacccgcgactgcggcgtcagctcgagtaattcggtcattcgcgccaccatatacggctgcgaaattgtctgcccctgacctatcggcaaggcgatattgtcccaggctttttgttcaaacgcttcatcaacgaatttttcacgcggcacggcggcaagtgcattcagcaccagctcatcctgaataccttgcgcacgtaattgatccagaagtgcttgtacgcgtctgcttaccattgcgtgccaactcccacgctgtttaaccagtctgaaaccacatcttgcgcgctatgcgcagttaaatccacatgcagcggcgtgatggaaacatagccctcatctaccgcagcaaaatcggtccccggaccggcatcacatttaccgcccggcgggccaatccagtacagcgtattgccgcgcggatcttgctgcgggatcacctgatctgccggatgtcgtgtaccgcagcgcgtcacgcgaatacctttgatttgatccaatggtaaatccggaacgttaatattaagaatacgcccggtgcgcagcggctctttacacagtgcgcgcaaaattgagcaggttaccgccgcggcagtgtcgtaatgtttatgcccgtcaagcgagacggcaagcgccggaaaacctaaatgacggccttccatcgcggccgctaccgtaccggaataaataacatcatcccccagattcggcccggcgttaattccggacacaacaatgtccgggcgcgggcgcatcagagcatttacgccaagatagacgcaatcggtcggggttcccatttgcacagcaatatcaccattttcaaaggtaaacgtgcgcagggaggattccagtgtcagagaattagaagcgccgctgcggttacgatcgggggcgaccacctgaacgtcagcaaactcacgcaaggctttcgccagcgtttgtataccgggtgcatgtaccccgtcatcattactcagcaatatgcgcataatcacctgttgtgttgataagttccctgacaacgctggttgcaaaacttcccgccggaagccagaaacggatttctacggtgacgtcatcccaccagttccagcttaattgttgcggatacagcagcatcgctctgcgcgcggcttcaactttttcgcgcaccagtaaggtttgtaattcagtttcttcggcgacagctgcttgttcgaatgccagcgcttcacgctgagttccccattcgccactgcccggcaatgcggcggttatcatcagctctttatcgttgacgcgacgctgtaattccgccagttcttcggtggttgcgacaaaccagctaccacgtccggctaattgtagcgcatcgccgtcaacaacttgattaacgtctgcttttttgaggcgctcagcaacaatctgattaaacaacgcactgcgggctgccgacaaccaaaaactacgtttattgcgatcgcgcaccggagtattggtttgcgcccagcgcagcgcaccctgcaagttgctaccgccaatcccaaaacgttgggcaccgaagtagttcggtacaccttttacgcaaatatcgatcagacgttgttcaacgtcatcgcgattgctcacttcgcgtagtaccagggtaaaggcgttacctttcagcgcccctaaacgcagcttgcgcttgtgccgcgcatactccagcacctggcagccttccagttgaaaggcgctcagatcgggcatctctttgcccggcacgcgagcgcataaccactgttccgtaacagcatgtttatctttttgcccagcgaagctgacttcacgggcatgaattttcaggaatttcgccagtgcatccgccacaaaacgggtattgcaaccgtttttgaggattctaaccagaatatgctcaccttcaccatcaggctcaaagcccaaatcttccaccaccacaaagtcttccggattcgctttcagcagcccggtgccttgcggtttaccgtggaggtaagtgagattatcaaactcaatcattttgttgccttaatgagtagcgccaccgcttcacaggcaatcccttccccacgtccggtaaatcccagtttttccgtagtagtggctttcacgttaacatcatccatatggcagccgagatcttcggcaataaacacgcgcatttgtggaatgtgcggcaacatcttcggtgcctgagcgatgatagtgacatcgacgttgccgagggcataacctttcgcctgaatacgacgccaggcttcgcgcaacagctcgcggctgtcggcacctttaaatgccggatcggtatccgggaacagcttgcctatatctcccagcgccgccgcgccaagcaatgcatcggtcaacgcatggagcgccacgtcgccatcagaatgcgccagcagccctttttcgtaaggaatgcgtacgccaccaatgataattgggccttcaccgccaaaggcgtgtacgtcaaaaccgtgtccaattcgcattatgtattctcctgatggatggttcgggtgaggtaaaattcggccagcgccaaatcctccgggcgcgttaccttgatgttatccgcgcggccttcaacaagttgcggatgaaaaccgcaatattccagcgccgaggcctcatcggtaatggtagcgccttcatttagagcgcgcgtcaggcagtcatgtaacagctcacgagggaaaaattgcggcgtcagcgcgtgccataagccgttgcgatcaacggtatgagcaatggcatttttgcccggttcggcacgtttcatcgtatcgcgcaccggcgcagcgaggatccctcccgtgcggctggtttcgctcaacgccaacaatcgcgcgaggtcatcctgatgcagacaaggacgagcggcgtcatgcaccaatacccactgcgcgtcgccagcggctttcagacctgccagcacggaatcggcacgctcttcaccaccatcaacaaccgtgattcgtggatgattcgccagaggaagttgtgcaaagcggctatcgccaggacttatggcaatgacgacacgtttcaccctgggatgcgccagcagcgcatgcaccgagtgttcaagaatggtttgattaccgattgagagatattgcttaggacattccgtttgcattcggcggccaaatccggccgccggaaccacggcgcaaacatccaaatgagtggttgccatgttaattcccgggctgatttatcgattattttgccccgcagactgtgcgcgctttgacgcgtcaggcaccagacgataaaacgtttcgcccggcctggtcatgctgagttcattacgcgcacgctcttcgagcgcctcctggccgccattgagatcgtcaatttcggcaaaaagctgatcgtttcgcgctttaagtttcgcgtttgtagcttgctgtgccgccacatcattattgacgcgagtatagtcatgtataccgttcttaccgaaccacagcgaatactgtagccagaccagaatagccagcaacagcagcgttagtttacccatcctgccccctgaaaaacggcatcttcatcccatgcatccgaagacgactctacatcctctgttggggataccgcgacaacgcgggcaaatgtaccacatttgtcgattgttacgtatacccagggcgtgcagaacataatctcattattagttacggattgaattatgaacagaatagagaggaaagaacaattaacccagtagccacataaacagtgcaccaaacataatgccaaccgtcgccagagtgaaaacaatactgtagcgtagctttccgtccatcaatgaatgcagtgcaatccccaccactacagcgacgggcatcagcgccagaaagaaaggccaggtgtagataaaaaagagcagcgtgttagagccataaatcaacatcggaattgccaacgcgcacagccacgataaaaaaccaaccacagcgccaggcagcgaccatgtggtgtcttcaacctcagtaaggctgtcgttatttgttaatgtaatgttgtggctgttacgcatatctgatcccatgttactttgacgaaccgggcatgaaaacccggtggtgtctcaggatctgataatatcgttctgtctcaacagatctaataattgctgtaccaaatttgttactaattgttcaccattgagatgaatttctgccgattcaggcgcttcgtaaacggaatctattcccgtaaagttgcgcagttcaccggcacgcgctttcttatataaaccttttggatcgcgggcttcgcaaatcgccagcggcgtatcgacaaacacttcgataaagcgcccttctcctacgcgttcgcgaaccatctggcgttcggcgcggtgtggcgagataaatgcggtcagcaccaccagtccggcttcaaccatcaaattcgccacttcaccgacgcgacggatattctctttacggtcggcatcgctaaaaccgagatcgctgcataatccgtggcgaacgttgtcgccatccagcagatacgtactgacgccaagtttatgtaacgcctcctccagcgcccccgcgacggttgatttaccggaaccagagaggccggtaaaccacagcacaacaccacgatgaccgtggtgctgttcgcgttgttgcggagttactgggtggctatgccagacgacgttttcgtcatgcagagccattatttatctcccagtaaatcgcgcgcaccccaatgcgggaaatggcggcgaaccagggcattcaattccagttcgaatgcactgaattcagatggcgcagcagttgcctggctaactggttcgtgcaccataccggcacctacggtcacattactcaggcgatcgataaaaatcagcccaccggtaaccgggttttgctgataacgatctaacaccagtggctcgtcaaaggtgagatctaccaggccgatgccgttcagcggcaggttttcaacttcgcgttgggtaaggttattgatatcaacctgataatgaatgccatcaacacgagcacgcgtcttcttaccggcaattttgatgtcgtaactctggcccggggaaagcggctgttccgccatccataccacatccaccgacgcgctctgcacagccggtaacgcttcgtctgccgccagcagcagatcgccacggctgatgtcgatctcatccgtcagcaccagggtgatcgcttctccggcaaaggcttcttcgcgatcgccatcaaaggtcacgatccgcgcgacgtttgattccacaccagagggcagcactttgacacgttgcccgacttccacacgaccggatgccagcgttccggcgtagccacgaaaatcgagattcggacggttaacgtactgcaccgggaagcgcattggctgagcatccaccactcgctggatctccacggtttccagcacttctagcagtgtcggaccgctgtaccacggcatactttcactttgcgaagccacgttgtcgccttccagtgcggagagcggcacaaagcggatatccagattacccggcagctgcccggcaaaagtcagataatcttcacgaatacgggtgaacgtctcttcactgtaatccaccagatccattttgttgatcgccacgaccagatgtttgatccccaacagtgtggagataaaactgtgacgacgggtttgatcgagcacgcctttacgggcatcgatcagtaagatcgccagttcacatgtcgatgcgccagtcgccatattgcgggtgtactgctcgtgccctggggtgtcggcgataataaatttacgcttctcggtagagaaatagcggtaggccacatcaatagtgatgccctgttcgcgctcagcttgcaggccgtccaccagcagtgccagatccagcttttcgccctgggtgccgtgacgcttactgtcgttatgcagcgatgagagctgatcttcgtagatttggcgggtatcgtgcagcaggcgaccaatcagggtacttttgccgtcatcgacgctaccacaggtcagaaaacgcagcaggcttttatgttgttgcgcaatcatccaggcttcgacgccgccttcattggcgatttgttgtgcaagtgcggtgttcatcttaaaaatacccctgacgttttttcagctccatagaccccgcctggtcgcggtcaattacgcggccctgacgttcactggtggtggaaaccagcatctcttcgatgatctccggcagtgtttgcgcatttgactccaccgcgccggtcagcggccaacagcccagtgtgcggaaacgcaccatccgttttttaatcacttcgcccgattgcaggttgatacggttgtcatcaatcatcatcagcataccgtcgcgttccagaaccggacgttccgcagcgagatacagcggaacaatgtcgatattttccagccagatgtattgccagatatcctgctcggtccagtttgagagcgggaagacgcggatgctttcgcctttgttaatttgcccgttgtagttgtgccacagctccgggcgctgatttttcggatcccagcgatggaagcggtcacggaaagagtagattcgctctttagcgcgggatttctcttcgtcacggcgcgcaccaccgaaggcggcatcaaaaccgtatttgttcagcgcctgtttcaggccttcagttttcataatatcggtatgtttcgcgctgccgtgtacgaatggattaatccccatcgccacgccttccgggtttttatgcaccagcagctcgcagccgtaggctttcgccgtacgatcgcggaactcatacatctcgcggaatttccagccggtatcgacatgcagcaacgggaaaggcagcgtacctggataaaacgccttgcgcgccagatgcagcatgacgctggaatctttaccgatagagtagagcatcaccggatttgagaattctgcagccacctcgcgaataatgtggatgctttccgcctccagttgccgcaggtgggtaagtcgtttttgatccataaccgttcctttgcaataccgctattttcttgccatcagatgtttcgactatagggagcgtaagagaacgaatgaaattaccaattagaatgagtagttccttaacggaataacgatttggcaaagctaatatcaaaaagtgcttaaggcaccggatttcgggcgtttaggaagatttgaaattgttttagcgcagcggcagtttcatactatggcggtaaaaaaatttgcatggtatttaaggactcactatgttttccgcattgcgccaccgtaccgctgccctggcgctcggcgtatgctttattctccccgtacacgcctcgtcacctaaacctggcgattttgctaatacccaggcacgacatattgctactttctttccgggacgcatgaccggaactcctgcagaaatgttatctgccgattatattcgtcaacagtttcagcaaatgggttatcgcagtgatattcggacatttaatagtcggtatatttataccgcccgcgataatcgcaagagctggcataacgtgacgggaagtacggtgattgccgctcatgaaggcaaagcgccgcagcagatcatcattatggcgcatctggatacttacgccccgctgagcgatgctgacgccgatgccaatctcggcgggctaacgttacaaggaatggatgataacgccgcaggtttaggtgtcatgctggaactggctgaacacctgaaaaatacgcctaccgagtatggtattcgatttgtggcgaccagcggcgaagaggaaggaaaattaggcgctgagaatttactcaagcggatgagtgacaccgaaaagaaaaatacgctgctggtgattaatctcgataacttaattgttggcgataagctgtatttcaacagtggcgtaaacacacctgaagcagtaaggaaattaacgcgcgaccgggcgctggcaattgcccgcagccatggaattgccgccaccacaaatccaggtttgaataaaaactatccgaaaggcaccgggtgttgtaatgacgcagaaatattcgacaaagccggtattgctgtactttcggtggaagcgactaactggaatcttggcaataaggatggttatcagcaacgcgcaaaaacagccgcattccctgcgggaaatagctggcatgacgtaagactggataatcaacagcatattgataaggcacttcctggaagaatagaacgtcgctgccgtgatgttatgcggataatgctaccgttggtgaaggagctggcgaaggcatcttaatgggtttgaaatgattactcccttgcctgcaggaaatcaatgccaccagaaacagagtataaaaaagggtgcaggagaccaaaccatcacaattcagtacgcggggttttaccccgcgtggtggctacttcttcgattcgtaagcgagaactgccttaaactccataccacgttctctgatactcaactcacacaacgagtcgcctaccatcaacgtgaatcccagtactgtacaacacagtacgatgattgccacaagggcatattttgtcagcatgtcttgcctccctgcaaagaagagactaacatccgaattgcttaggttcgaacgtaggcctcaggttgatagaaatatcgcctggggcttttgtccatctggaacctcgcgaatgcttaacgccagacagcctcaagcacccaatgccattctatacctgttaattctccctgcgacgttctcgtttaaatgccggaatgctgctcgcaaaataaaaacgcccccatcatttctgacagaggcgtttaatttatccggcaatatttacccttcgtgtaatccacattccctttttaagccaaagaaacgcgtttcttcttccgccatgccgggttcccatttacgggttgtatgggtatcgcccaccgataaatatccttcatcccataatgggtgatatttcaggccatgtttttgcaggtactgataaatagttcggttatcccagtcgataatcggcagcactttaaatacgccacgctgaattgccagcaccggtaaattggcgcgactgccggattgttcacggcgcaggccagcaaaccaggtttgcgcattcagttctttcagcgcccggttcatcggttcgactttgttgatgtcattgtacttttcaatgccttcaacgccctgctcccacagtttgccgtagcgtgcttcctgccaggcggcgctttcggtagcacggtacactttcaggttgagcttgagtttgtccgttaactcgtcaataaagcggtaggtttccgggaacagatagccggtatcggtgaggatcactggaatatccgggcgaatctgattcaccagatgcagactcaccgccgcctgaatgccaaagctggaagaaagtacatattcaccgggcagattatccagcgcccaggctacgcggccttcagcgtccagtttttccagttgggcgttagtttccgccagcgccagaatccggtctacctttggcagttcgttcagggcgtttagatcgagtttggacataagttcctcactgtttgccttgcctgatgcaacgcttacacatcttatcaggccaacaagaccgggctgatggttaatcccataaatcgcgcgccggatcgagcaccgggcgaatgatgcccgcacgcaccgtaaagtcgccgaagccttcacccgcttcgcgctctttcgcccagcgccctatcagttcatcaagcgacgccaggatttccggctcggtgatgttttctttatacatccgtgggatacgtgtccccatacggttgccgccaagatgcaggttgtagcgccccggcgctttacccaccaggcccacttccgccagcatcgcgcgaccacaaccgttcgggcagcctgttacacgcatcacgatatgctcatcgctgacaccatgtttcgccattaaattatcgatgttgtcgataaaagacggcaggaaacgctccgcttccgccatcgccagcgggcaagtcgggaatgacacgcaggccattgagttttcacgctgcggcgtgacggcattcattaacccgctctctttggcgatcttctcgatcttcgctttctcgctttccggcactccggcgatgatcagattctggttcgccgtaatgcggaaatcacctttgtggatcttcgcgatctccagcaggccggttttcagcggacgccccggataatcaaggatgcgaccattttcgataaacagcgtcaggtgccagttatcatcaatgcccttaacccagccaatacgatcgccgcgtccggtgaactcatacggacgaatcggctcgaatttgatccccgcgcgacgttcaacttccgctttaaacgtctcaacccccacgcgctccagcgtgtatttggttttggcatttttacgatcggttcggttaccccagtcacgctgagttgtcacgacggcttccgccaccgccagcgtatgctccagcggcagatagccaaactcactcgccgtgcgggcgtaggttttcttgttgccgtgttcgatggaaagcccaccgcccaccagcaggttaaagcccaccagcttgccgttttcggcgatcgccacgaagttcatgtcgttggcgtgcagatcgatatcgttctgcggcgggatcactaccgtggttttgaacttacgcggcaggtaggtctgaccaaggatcggctcttcatcagtagtggcgactttttcctgatcgagccagatctccgcatacgcgcgggtacgaggcagcagatgttcagaaattttcttcgcccattcatatgcttccgcgtgcagctgcgactcgtaagggttcgaggtgcagagtacgttacggttcatgtcgttggcggtcgccagcgcatcaagaccgaccgagtgcagcatctggtgcaccggtttgacgttctttttcagaatgccgtggaactgaaacgtctggcggttggtcaggcgaatgctgccatagatggtgttttcaccggcaaatttgtcgatcgcctgccactgtttagtggtaatcaccccacccggcagacgacagcgaagcagcatcgcgtgacgtggttccagcttctgttcagcacgttcggcgcggatgtcgcggtcatcctgctgatacatgccgtggaagcggatcagcaggaagttatcacccttaaagccgccggtcagaccgtcgtttaaatcttccgcaatggtgccgcgcaggtagttgctttcaagcttcatgcgctcggcgtctgtcagttttccttcgaccactaaaggtcctggatgtttttcgctcattagtagacatctcgctgataacggcgctctacgcgcagctcacttaaaaattcatccgccgcttcggtgtccatgccaccaaattcggcaatcacttccagaagtgcctgctcaacgtctttcgccatgcgattagcgtcgccgcagacataaatgtgggcaccgtcattgatccagcgccacagctctgcgccctgttcgcgcagtttgtcttgtacgtaaattttttctttttgatcgcgcgaccaggcgagatcgatgcgcgtcagcacgccttctttgacgtaacgctgccattccacctggtagaggaaatcttccgtaaagtgtgggttgccaaagaatagccagtttttacccggcgcttcgtcggcagcacgctgctgcataaaggcacggaacggcgcgatgccggtgccagggccaatcatgatcaccggggtttccggattggttggcaggcggaagttgtcgttatgttcgataaagacgcggacttcaccctcttcttccacacgatctgcgaggaagctggaggcaccaccggcacgggcacggccttccacgtcgtaacgcaccacaccaacggtaacgtgcacttcgttctcgacttccgcctgcgaggaggcgatggaatacaggcgcggggtcagcgggcgcagcagattaatcagcgcttcggcatccagttgcgccggagagaaacgcaccatgtcgacaatcggcgtcgtcgcggcgtaatgctgtaatttcgctttatcgcccaccagcggcagcagcgtttcgctgcgggtaagcgtggcatagttctcaacaatgttggcggtgttgacggtcagttcgaagtgccactgtagcgcttcgttcagaggcaacgttttgccctcgacggtgacaggttcatcgcctttcagccacagcagttcgacaagttctttcaccagtgccggatcgttctgataccagacgcccagcgcgtcacccggctggtaacgcaggccagagtcacctaagtcaatttcaatgtgacgaacgtctttttcagagttacgcccggtaattttctggttaaccgaaaggctggccgccagcggcgcgtctttgctatacgggctggtgtggatttcatttaccgcgccagtagcgacggattgcgaaggcgccgcgacaggcgcacgcgatttaagcgcatcaaccacgcgggcgcgccactcgctggcagcagcctggtattcaacatcggcatcgacacggtctagcaggcgttcaccgcccagttccgccagcttactgtcaaaatctttcccggactggcagaaaaattcataagagctatcgccgaggctaaacacggcaaacgcggtgttttccagctttggcgcttttttggagaacaggaacttatgcagcgcgacggcttcttccggcggttccccttccccttgcgttgacgtcaccacgataagcagtttttcgctggcgatttgtttgaatttatagtcacccgcgttcaccagcttaacgttcagttttgccgctaataaatcatcgcgtaatgcttcagcaacccggcgcgcattgccggtttgcgaggcggagataatagttatacccggcatttctgcggcgggcgctggcgtcgctgcaagcgcagcaggctgctggttgagcacgccccagaaatagccagaaacccaggcaagctgggtaggagttaaatcggtcgtggccgcctgaaggcgtgccagttgctccgggttcaacggaagcaacgcggaaggtgggacctgtgtcgtcatgcgtcgttatgttccagtaagcaaagctgtttctgcgccctgtcagcgcccataaaacagaagagaaggtaaggttaacggggtgaacggtgtggattaaagacgggatagcgataactaataaccaaatcgactaacctgttttagcaatagtctttaacaacaaaatagattaaccaacccaatgaaaaacaaatgaatattgcccatcaataagataaatcagcgattttgcgcaacaaagtcgttttagataatgcgaaaaaacagcctttccggtactctacggcggttttatcgtcatgtagagaaattatgatgtccaccacgttatttaaagatttcaccttcgaagccgctcaccgcttgccgcacgtcccacaagggcataaatgtggtcgcctgcacgggcattcctttatggtgcgactggaaattaccggggaagtcgatccgcatacgggctggattatcgatttcgctgaactgaaagcggcgtttaaaccaacttatgagcgcctcgatcaccattatctcaatgatattccaggtctggaaaacccaaccagcgaagttttagcaaaatggatttgggatcaggttaaacccgttgtgccgctgttaagtgcggtgatggtaaaagaaacctgcaccgcaggttgtatctatcgcggcgaatgataagagtgtgtcggcggtcaatttcccttaagtaacgctatgttagggtgttgtgttctggatatctggggcatgacatggaagacgactgcgacattattattatcggtgccggaattgctggcaccgcttgcgcgttacgctgcgcgcgagcgggtttatccgttttgttactggaacgagcggagattcccggcagcaaaaatctttccggcgggcggctatacacccatgcgctcgcggaactcctcccgcaatttcacctgaccgcgccccttgaacgacgcatcactcacgaaagtctttctctgttaacgccagatggcgcaacgacgttttccagcttacagcccggcggtgaatcctggagtgtattacgtgcacgattcgatccgtggctggttgccgaagccgaaaaagaaggtgtcgaatgcatccccggtgcgacggtagatgcactgtatgaagaaaacggcagggtgtgtggtgtcatttgtggtgacgatattcttcgcgcccgttatgtggtgctggcagaaggtgccaacagcgtcctggcggaacgccacgggttagtgactcgtcctgctggcgaagcgatggcattggggatcaaagaagcgctggcgctggaaccatccgctattgaagaacgttttcatctggagaataacgaaggcgcagcgttgctgttcagcggcgggatctgtgatgacttacccggcggcgcatttctttatactaatcaacaaacgctctcgttagggattgtttgcccgctctcctcccttacgcaaagtcgtgttccggcaagcgagctgctgactcgctttaaaacgcatccggcagtgcgcccgcttatcaaaaacacggaatcactggagtatggtgcgcatctggtgccagaaggtggcctgcgcagtatgccggtgcaatacgccggtaacggctggctgctggtgggcgatgcgttgcgcagttgcgtcaataccggaatttccgtgcgcggtatggatatggcgctaactggcgcgcaggcggcggcacaaacgctgataagcgcctgccagcaccgcgagccgcaaaatctgtttccgctttatcatcacaacgtagagcgcagcctgctgtgggatgttctacagcgttatcagcatgttccggcgcttttgcaacgccctggctggtatcgagtgtggcctgggttaatgcaggatatttcccgtgatttatgggatcaggggaatacacctgttccaccgctgcgccagttgctctggcgtcatttacgtcgtcacggcttgtggcatctgacgggcgatgttatcaggagtctacgatgtctgtagcccgtaatctctggcgcgctgccgatgcgccgcacattgttccagctgactccgttgagcgccagacggcacaacggttgattaacgcctgtccggctggtcttttttcgctcacacctgaaggtgacttacgcgttgattatcacggctgcctggagtgtggcacctgccgtttgctgtgcgacgaatcaacactacaacagtggcgctatccgccttccggattcggcatcacctaccgctttggataaataacaaggataatttatgtccctcttacacctgctccgccagaatccggtgattgctgccgttaaagataatgccagcctgcaactggcaatcgactctgaatgccagtttatttccgtgttgtacggcaatatctgcaccattagtaatatcgttaaaaagattaagaacgccgggaaatatgcttttattcatgttgatttgctggaaggcgcgtcaaataaagaagtggtgattcagtttttgaaactggtaaccgaggcggacggaattatcagtaccaaagcctcaatgctgaaagcagcaagagcgggaaggttttttctgtattcatcgactgtttattgttgattcgatttcgtttcacaacattgataagcaagttgcgcaatcgaatccggattgtattgagatcctgccaggctgcatgcctaaagtgctgggctgggtgacggagaaaatccgccaaccgctgattgctggcgggctggtgtgcgatgaagaagatgcgcgtaatgcgattaacgcgggtgttgtggcgctttccaccacgaatactggggtctggacgttagcgaaaaaattgctttgacgggataatcgtaacaagttgaatttggtgtgatttgtaggctgcacgccacatccgacattcagcgcctgatgcgacgcttgacgcgtcttatcaggcttacaagtccccagcccagaaccgtaggcaggatcatccggcagcacgttattggcaatctgcgtgaatggttgtcaccagtgcctccagcaccgctttccagtcatcaaccacgccaacatctgcctgtgaaaataccgccgcgctggcgtcatgattaatcgccaccacaaacttgctattgcgtacgcccgccattaacgctgctgcgccggaagcgccaacaacaatacacacctcaggtgccagcagatgtccggaaataccaatcactttttcggcatcaacgccaccgttcatcactcgtgcccgactgtagcccacttcgactcccatcttttctgccagcatagcgatttcctggttatctgcctctccgccctgccccaccaccagcacccgtctggcctcagctaatgggtcacgggtaacatttttcagattttcgacgctgataagccagtctggaagcgcgccggggacaatgttcagttgctgcatcccagagggcaacgtggcgtttttatctgctcccgcctgacgtgccagcgaaaggcatagcgggcgtttttctgtttgcaacgtcgccgttagcgcatttccccagtgagatttgcgcacgcttgcggttgatatatcgaatgaaatcacctggcagatactggcgccatgtacacgccaggccagtcgggtagccagttcatcgccaaacgcgcccggaggaaagaggacaacctccgcaggcgttcgttgccactgttccaccagcgcatccagcacctgttccgcaatcatcggctgtggttctatttgccagtgtgccagggtacaaccgctgaaatcctgcgccgccagccagctcgctattgcggcatggtcctgatttattgtcacaagtacgatattcatggctgcatcctttggcataaatagtactgccatagcttttgcgctttttctgctaccgtttgcccatcaatcagcgtcgctccgcgtcgttgctctgctcttgccagttgcagacactgcatcgctggcatttcggcagcaacagttttacggataatttctgctttccccgccgccattcgctgacgcattcccggtactggcaaggccacttcaccgcactgacgcacggcaatcaccgcaggcaagcgaacccggcaacagcgcagcccgttttcagtacgctgttcgagggtgataaacggcgcgtcgagagtgaaacgctccacctgggtgaagcagggccagcccagcatttccgccagcaaaaatggcgtttgcccattctgcccttcgctgctttggcagccagtaattatcagctccagcggattctggtactgccattcggcaatatggcgagcgacaaattccggcgcaaagcgcagatctgccgccgtctccagcaatacagcgtcctcaaacccaagagccatgagatagcgcagccagtgcaacgcccgttcatcccccatgctcaacgcggttaaagacatcgacgtaccgttttttctctgcgccaacagcagcgcggcggcagcctgttcatcagcaccgagtaaacttcgcagaagcgaaacatccggtccgctattaccctgagccgcctgccactctttttccgccagcattccggcatccggttcggctttaaacgctaacagaatgttcattcgcacctcctacatttcccgccgccaccagcgggagtgctttggtttctggtgcccatagccaggtcacaacaaaaccaaccaacaacactgccgccaggagcaataaggtggcttgcattccccactgcgccagcacccacggcagcaggccagtacttaccgccgcccccaaccgactcatggcggtggcaaaaccgacgcccagcgagcgaatgtcagtaggaaaactttccgcaggcaaaatgcccaccagattactgactgccgaaatggtggtgctgaagagaacaaaaagcagcagcgttaatgaactgccggaaggcaaacaggccattactaccagcgttgccgttagcagcaaaaaacttcccagtaaaaatctgcgatgcgctaacaagtgggtcaacactaaccctaataacgcgccaacaattaacaacgcattaagcatcaggctggcagtcagcgcatcttccagaccaatagtttgggcgatggtcggcagccaggtataaatcacaaaccatgggattacgaggcagacaaagaagacgctgttaaacgccgtgcgccgccagtagcgcgaagagaacaaggttttgatgtgtttatgggtcgccgttgccacttcatcgcccagtaaaacatgcgggccaaaatagcgatgaacgatagcgtgagcttctgcaaaacgcccctggcgcagtagccagcgtggcgattccggcgtgccccaacgtagcagcgtaatcagcaaggctggtaacgctgctgatgccagcagccagcgccaggcctccgggctttcggaaataaagtgatgtccggcaatacttgccagcacatagcctacggtccacaccacactgaatgcgcccagcaaaataccgcgatggcggcgcggggaaaattcagccagcaaggtgtgaccgactgagtaatcgcctcccagaccaatgccgatcaaaatgcgcaatccaataagatgctctggcgtggtggcaaaaaattgcaagaacgaagcgagcgtaatcagcataaaactgaaggtgaagattttttgccgcccgatatggtcggagatccaccccaaaaccaggctgccaagaaacaaaccaagtaacgccgagccgccgatcattcccgccataaacggcgtcagttgcatggcgggcgtaagctgaataatggcgtaaccaataacgccgaggacataaccgtcggtcaggtgtgcgccgaaagtgagcgcagcaattcgacagtgaaaacggttaagcggtaaatcatccattcgcaccggtgaagtgttcatctttaccccttcattgtccggtaataagaacggcttctcgcctgagaagccgaaaaggcaacgccccgtcatcgcggaacgctgcctgacacattatttttcaatcggatagatagtacccgtgttcataatgtcattaggatcgaactgctttttcagcccttccagcaacgcccacgcgctgccgtgttccagtttgctccagtgaacgcgatgtttaccgataccgtggtggtgcaccatcgaaccgccgagacgaatggtttcttcgcagatgattttgttgagcggattgtggtacttgtcgatttcctcttccggcttacagtcaacgacgttgtagtcgtagacgaagtacatgttggtgccgttctgatagctatgagaggagtgaccgcccagcatggtgatgtcgtcggcgtgcgggaactcggtacgaatacggttaataacgctttcgtagatttcgtgaatgcagctccagcagccggacacttcggtggtaaagcccatgttgccggttttgaggatctgcacacgttcggcagccactttatccggtccccagttcaggttgttaaaccaggtttcgatcagcttgctgtccacgcgctggcattgcgggtaacgggcaacgatttccgcaatcccttcgcccgtcgccttcgcaatgcgagagttaccttcagccataaagatcagtacacatttaccgtcggcaaaatgggtgaagtgttgggtgccatcttcagcatcatacaaacgagcaatcgacggacgatacccttccaccatgatttcacgcaggatgttgaagccggttttcatctcttccaggatatagccgtagaagagattgttttccggcgtaaatttgaagattttcactgtgacttcagtgatatagcacagtgcaccttcgttgccgatgatgatatgacgaatgtccgggccagccgcgcgacgtggcacgtttttaatgcgtgtgacggtgccatctgccagcaccgcttccagaccaacgaccatatcctcgattgcgccgtagagtgtggaaaactgcccgatactgcgggtcgccaccaggccgcccatctgcgccagcggctttgactgcggagaatgccccgtggtgtaacctttttcacgcaacgcgttttccagcacctccagcggaacgccacattgcgccgtggcctgcatattctcaatatcaatattaatgatttgattcatggcggagccgtcgagcaccaccgagttttccacaacggtttccagcccaccttcggtggcggaagcaccggtacgtggcacaccgttaattttgtgcgcattcataaaattcagcacacgggatacttgttctgtagaaccgagttttacgaccgctgccggaatcggcaaagtataaattccatgaatatccggaaatttacgaaaacggtcaatactgtttttctttaataccgtttcatcggtaattacgcgatctgcaccaacaatttcctttagctggtcgacaatcgctacgcgagataaagacatagtaattccttcctgataataaaaatggaatagttattaataagagaaaacagaaaccaccgttatgaattagcgcactaaataaccgccatcaaccactaataaatgtccgttgacataattcgatgccggacttgcgaggaatacagctgcacccattaaatcctgagtatcaccccaacggtttgccggaatatgatcaagaacacgctggttagtttctggattactacgggtcgccagcgtaatatcggttgcataataaccaggagcaataccattcacctgaatattatattggcctaattcatcgcaataggctttggtgaatccggcaagagcatgtttagtggcagaataagcaggtgaccattgaccacctaagtaagagaacaatgaacagatattaatgattttaccgcttttctgcgggatcataatttttgccgcttcgtagcttaactcgaatgcggcggtcaggttcacgtcaatcatcgggtcccagtcggcacgaccaaagtccagcaccttattcagcttacaaataccggcattgttaaccagaatatctacggtaccgaagcgctcacagcaggcagcgataatcttctgcggcgcgccttctgcggtgatatccacctgcataaaatcaacttcgacaccctgtttttcaatcatttccttagtttcgccgttatctttgacgaaactaggaataaagacatttgcgccagctttggccaacgccatggcaaatgcctggcctaaaccgctattcccgccggtaacaattgctgttttacctttcagggagaaaaaatccattgagaacgcattgagagattcgattgacatagttagctccaatttccgtaaggcaaaaaaaaagaaaggtaacttcccccgcgagagggaagttacctttctcattatctctggtaactggagataatttttagcataaggacataactgctaatgtgatcgtaatcacagtgtgatgttagtattgtcaaataatttaaaaaagcagaagcgtgattactctcacacaacacctctgctttccatgttatttcttattgcaattactagagacctgagaaaagtaatccacctgaaagggcggcttacttttctcttttttttgtctattacaaatgggaatacgatatgcaacacaactcatatcgccgttggataaccctcgcgataattagttttagcggcggcgttagtttcgacctggcttatttacgttatatttatcaaattcccatggcaaaatttatgggattcagcaataccgagataggtttaataatgagtacctttggtattgcggctattattctttatgcccccagcggcgttattgccgataaattttcacaccgcaaaatgattacttccgcgatgatcattaccggattactgggcctgataatggcaacatatccaccactgtgggtaatgctctgtattcaggtcgcctttgcgataacgacgattttaatgctgtggtcggtgtcgattaaagccgcatcgttgctgggcgatcatagcgagcaagggaaaattatgggctggatggaagggctgcgcggcgtcggtgtaatgtcgctggcggtgtttaccatgtgggtcttttctcgctttgcaccggatgacagcgccagcctgaaaacggtcattattatctatagtgtggtttacattctgctgggcattttgtgttggttttttgttagcgataacaacaatctgcgcagtgccaataacgaagaaaaacagtcattccagcttagcgacatcctggccgttttgcgcatcagcaccacctggtattgcagcatggtgatttttggtgtcttcaccatctacgccattctgagttactccaccaactatctgaccgaaatgtacggcatgtcactggtggcggcgagctacatggggattgtgatcaacaaaatcttccgcgcgttatgcggcccacttggcggcattatcaccacctacagcaaagtgaaatcccctacccgcgtggtccaaatcctttccatcatcggtttgctggcattgacagccctgctcgtcacgaactctaacccgcaatcggtcgcgatggggattggcctgattttattactgggattcacctgttacgcctcacgcgggctgtattgggcctgccctggcgaagcgagaacaccgtcttacattatgggcaccacggtaggtatttgttcggtgattggattcctgccggatgtcttcgtttacccgattatcggctactggcaagacaccctgcccgctgcagaagcctaccgcaacatgtggctaatgggcatggcggcgcttggcatggtgatcatctttacctttttgctgttccaaaaaattcgtactgctgatagcgcccccgcaatggctagcagcaagtaagccaggaaaattacaggagaaaaatcatgtcgaaaaaatacatcatagggattgatggcggaagtcagagcacaaaagtggtgatgtacgatctggaaggtaatgtggtttgcgaaggcaaaggcttattgcagccgatgcacacgccagatgccgataccgcagaacatcctgacgacgatttatgggcatcactatgttttgccagtcacgatttgatgagccagtttgccggaaataaagaagatattgtcggcattggcctgggctcaatccgttgctgccgtgcgttattgaaagccgatggtacgccagccgcgccgttgattagctggcaggatgcacgcgttacacgcccttacgaacacactaatcctgacgtggcctatgtcacctctttttcgggttatctgacacatcgcttaaccggcgaatttaaagataatatcgccaactattttggtcagtggccggtggattataagacctgggcatggagcgaagatgccgcggtaatggaaaagtttaatatcccccgccagatgctttttgacgtgcaaatgccgggcaccattcttgggcatatcacaccacaagctgcgctggcgacacatttcccggctgggctgccggttgtttgtaccaccagtgataaaccggtagaagctctgggagccgggttactggatgatgaaacggcggtaatttctcttggcacctatatcgcgttgatgatgaacggcaaagcactgccgaaagatccggtcgcgtactggccgattatgtcttctattccgcaaacattgctgtatgaaggttacggtattcgcaaaggcatgtggacggtgagctggctgcgcgacatgttaggcgagtcgttaattcaggatgccaaagcacaggatctttcaccggaagatttgctcaacaaaaaagcgtcttgcgtgccacctggttgtaatgggctgatgacggtgctggactggctgaccaatccgtgggaaccgtacaaacgcggaattatgatcggctttgattccagtatggattacgcatggatatatcgttcgatactggaaagcgtggcgctgacgctgaagaataattacgacaatatgtgtcatgaaatgaatcactttgcaaagcatgtgatcattactggcggcggttcgaacagcgatctgtttatgcagatttttgccgacgtgttcaaccttccggcacgccgaaacgccattaacggttgtgcaagtctgggggctgcgatcaatacggcggtaggtctggggctatacccggattacacaacggctgtcgataaaatggttcgcgtgaaagatatcttcataccgattgagagcaatgccaaacgctacgacgcgatgaataaaggcattttcaaagacctaaccaaacatactgatgtgatcctgaaaaaatcgtatgaagtgatgcatggggaattggggaatgcggattcgatccagagctggtcgaatgcgtaagtgaggaaggccgggcgggaaactgtccggcctgaacatacctgaatggttatccccgctgacgcggggaactcatatccggtttttgctggtgggccgcgccgttcggtttatccccgctggtgcggggaactctctaaacataacctattattaattaattattttttaagacagtcacaatctaccaactttacagtatcacacaaacaacacatccattatgttaaagagcacttaatccattgattaaaaagataaatatttacaatgactctattcaaactaaaatctaccaaactttaccgcaataattttcactccagcgaaaaattaacgccacagaatttgtagagaatgataatgattagtccagaatgggcaaaatggaggtttttcagagacgacaaagaatataaatgagtagaagtctttacagattccacccatttataacgcttataaatgtttaatcaggcaatattcaaatatttatgtgtctgcatcgacaaacgccagttgcgcgcaatgcaggtatcgatacataaacgcgtagcatcttccttctggctaattggctgaagtgcaatgactcgcggtttatcatcggtcagcgtcgccagcaattcatccagtgcttcaatatcacgtacgcgtcctactgggtgtttgatttcgttggctcgctccagggcttgtgacaacacttcatagccaccgcgcatatttagctttggtgatacggtaacccaggtattcggtgtgcagcgtacttcatgagtaccactggtttcgatctggcagctaaaaccgttcttttcgagcaggtcagtcagtggcagcaaatcatgaatgcaaggctcaccacccgtaatcaccacatgacgcgcggtgtatccctgacggccaatgacagccagcaaatcttcactgctcgccgccccccacttatcactctctttggtcttcgccagaatgctgaaaagggagacttcccgatcctcaagcttttcccaggtgtgtttggtgtcgcaccaggcacagccaaccggacatccctgtaaacgaataaaaatggcggggacgccggtaaagtaaccctcaccttgcagggtctggaacatctcgttaatcgggtactgcatagcattctctgtgaagtggataattgttaattattgcagatcctgccacaacaatcatgtcttattaacattctgttacaggcaggtttgatgcaaaaattggctcagatcattaagaataaaatgaagcggcgtattatgttttcaaggattaaatgaaagggatttaaacatgtttagaatattcatcgcgtttatatttattttcaatttatcaggttgcggttataacgatattcaaacctatgatgaacaggttaatgcctcctggtcagaagtattaaatcaatatcaacgtcgcaccgatcttattcctaatcttgtcgctagtattaaaggttactccagccatgaacaagaggtactagaagccgtaacattggcacgtagtcaggctaatcgcgccagtagcgatcttcagaaaactccgggagatgaacaaaaattacaagcctggcaacaggcgcaggcgcaggtgactcgcactctcgggcagttaacgattattagtgagcgttaccctcagttaaaggctcaagagctctatcaaaacttaatggtacagctcgaaggaagtgaaaatagaattgccgttgcgcgaggaagatatattaaagccattgaacaatataatgtcactatccgcaaattccccgctgtattaaccgcaaaggtcatggattacacaccaaagaaaaattatttgccggatgatgtcaccgcagtaagtaaagccccaacaatagattttagccagaatgctaatgctcattaagcggggacgttctatgcgaaattttatcttccttatagctttcttctgttcatctgtgtttgctacacaaattccagtacctgaatcacccaggtatgtgaatgacttaaccggcacattaacaaacagcgaagtaaacaccctgaccaaccagattaaagccctgacgcaaaaaaaccacgcacagttggtcgtgttagtggttgatacaacaggcgatgaaaccatcgagcagtacgcaacgcgggtattcgatagctggaaaccgggtgataaagaccgtgatgatggcgttctactgttagtcgcctggcaggatcataccgtgcgtattgaaatcggttacgggctggaaggtattattacggatgcacagtccgggaaaattattcgcaacagtattattccggcatttaaaaaaggcgacctggctggtggtttacaaaaggggatcaacgatattgaaagtcgcctgacggggaataattcagcaacgataacaccgaccgatcaccctttgccctttagcggttggtgggctttattagtctgggcgataatactgacgtttatttctgccagaggatatatcaaaacgttgggagtaatttgcttcgcagccattgtactggcctttgttttacctatagcaggtttcagcggaagctggggagtactcacaacattactctgcttcgccacaccgtttctggcagttgccatcgcttttacccccttcggcaaaaaggttcgggattcgatgcgtgatgccaaccagccatcacgccatacaagaagcaattcttcctcccactattcatcatcgtcatcctcttcattcgacaatgacaattttagcggtggtggcggttcatctggtggcggtggcgcttccgggcgctggtaacaaaaggaattgatatgcgtatttttctcttacttctgatgctatgcggttttcaggtattcgctgaacgattgccttcagtgactgacttaaccgggacattaacgacagaagaacaaagtgctttaaatcaacaattacagactctcgagcagcaaaaccacttccaggtggccgtgttggttacgccgacaacagggggcaaaaacattaaacttgcagcctcgcagagatacggggtatatcactggaaacccgttggagagaagcgatatggcgaaggtatcttaattctcgtcgtttggccggaagggctggcgtcaatgaagattggacatggactggaacagatgttgccgccggaacaagctgcgcaaattgttcgttaccatatgcagccagaattcgaaaaaaacaatctctttgctggattaacgggcggaattgaaagcatcgcacagtttacccatatcaaagcgaaccttagccctttggatgctttagccaatcatctgtttgctaatccgcaactttcgctgccatgccttgcctggacagtgctgatgatcgttgccatcattgtcctctggcgatttaccagccgtccaggacctggcatatggatgatatcaatgattacacctacggtctggtttttctgctttcaggacgatgtcatcattcggcgggtgtcggtcgtttgttttagtttatttttcgcagcaatctgctggcagcgtctcgcagtagtttttaatatgtgccgcgtatttcctatgatgctggccccaaaaaataaaaacgctaaagtgaaaaaacaaaagaagactccgcaatttcgtgaatcaggacgaaattcattgtttgtcgtgatgctgataattattgtgggatggtgcctggtgttcgccagtaataaagatattgcattcatctcaacaattattgggttaattgatcattttatcggcccaataaccattgctggcatcgttctgctgatcattgtggccaaatttactggcaatcttaagctggggtcaggagaaaaaagcaacaggaaaacggggaatcgtaatgctcatgctcattctcgctcttcgtcgagaaattctttccgcggtggtggcggttcttcaggaggcggcggttcatccggccgttggtgatcgtaatgcgcttaatctttattctattcactttgtggtgccttcctgggcttgcccagcaaattgctgtgccggaactgcgccaacaggtgaccgatattactggtacgttaagcacttctgaacaacaatcactgacacagcaactgcaggatattacacataaaacacgggcgcaggtcgctgtattagtagtgccgtccatcggagacgattccattgaacaatatgctacaagggtttttgacaattggcgtttaggagatgccaaacgtaatgatgggatactgatcattgttgcctggtcggatcgtactgtccgcatccaggtaggttatgggctggaagaaaaggtaaccgatgctctggctggcaatatcatccgtagcatcatgatacccgcctttaaaaaacaaaaattagctaagggattagagttagctataatcgctttgaataaccaactcacttcacaacaccaatattcgtctaatccttcagaaagtgaatcagcgtcttccagtgatcattactactttgctattttttgggtatttgcagtgatgttcttccctttctggttttttcatcaaggcaataatttttgtcgggcatttaaaagcagtgtttgtatttcaacagtctatcttatagatttattcctgttctccgatcaaactttttccattgctgtattttccttcttttttgctttcaccatcattatggtctttacctggttatgtgtcccacagaaaaaagcatcaggtagaagttatcattcagacagcggcggttctggtggcggctcaagtggcggcggatttagcggaggtggcggttcttctggcggtggcggcgcgtctggccgctggtaactcagccataaaaaatgccagcccgaaggctggcatttttaaatcagataaagtcagacttatgcctggcctttgatctctttacgaccgttgtacggtgctttttcgcccagagcttcttcgatacgaatcagctggttgtatttagcaacacggtcagaacggctcatggaacccgttttgatctggcctgcagcagtaccaacagccaggtcagcgatggtagcatcttcagtttcaccagaacggtgagagataactgcagtgtagccagcgtctttcgccatcttaatagcagccagggtttcggtcagagaaccgatctggttgaatttgatcaggatggagttagcgatgcctttttcgataccttctttcaggatcttggtgttggttacgaacaggtcgtcaccaaccagctggattttgtcgcccagaactttggtctggtatgcgaaaccgtcccagtcagattcgtccagaccgtcttcgatggaaacgatcgggtactgtttggtcagttcttccaggaagtgagtgaattcttcagaggtgaatgctttgttgccttcgccagccagaacgtatttaccgtctttgtagaattcagaagctgcgcagtccatcgccagagtgatgtctttgcccagttcatagccagcagctttaacagcttcagcgataacagccagagcttcagcgttggaacccaggttcggcgcatagccaccttcgtcaccaacagcagtgttcatgcctttcgctttcagaacttttgccaggtgatggaaaacttcagaacccatgcggatggcttctttcacagttttcgcgccaaccggctgaatcatgaattcctggatatcaacgttgttgtcagcgtgctcaccaccgttgatgatgttcatcatcggaaccggcatagagtatttgcccggagtgccgttcagttcagcgatgtgctcgtacagcggcatacctttagcagctgcagcagctttggcgttagccagagatacagccaggattgcgttcgcgccgaatttggatttgttttcggtgccgtccaggtcgatcatgatcttgtcaatgccagcctgatctttagcatctttgccaatcagcgcctgagcgatcgggccgtttaccgcagcaacagctttggttacgcctttacccaggaaacgggatttgtcgccatcgcgcagttccagagcttcacgggaaccagtagaagcacctgacggagcagctgccataccgacgaaaccaccctccagatgtacttcggcttcaacagtcgggttaccacgggagtcgatgatttcacgaccgatgatttttacgattttggacattaggttttcctcaagtcactagttaaactgaaactccagacaaacaacgcgtacccagggtacgcgttgccgttctaacttttttacttacttcgcctgacgtttctggaactcgctggcggctttcacaaagcctgcaaacagcgggtgaccatcacgtggagtagaagtaaactccggatggaactggcaagccacgaaccacggatgattcggaacttcgatgatctcgaccaactgatcatccccggaacggcccgcaacgcgcagacctgcatcttcaatctgtttcaacagcatgttgttgacttcgtaacggtgacgatgacgctcaacaattgtcggcgcattgtacagctggcgaaccaggctatcgtcaaccaactggcactgctgtgcgccgagacgcatggtaccgccgagatcgctcttctcgctacgaacttcaacgttgccgttttcatcgcgccactcggtaatcagcgccacaaccgggtacttacagtctggcacaaattccgtagagttggcgttctccatgttggcaacatggcgagcgtaatcaattaacgccacctgcatacccaggcaaatgcccagataaggaatattgttctcacgcgcaaaacgcgcggtcgtaatcatgccttctacgccacgatagccgaaaccgccaggtacgaggattgcgtccagacctttaaggatttcaacgccgcgcgtttcaacatcttgtgaatcgatcagtttgatgttgacgctgacacgattcttcagcccaccgtgtttcagtgcttcgatcacggatttgtatgcatccggcagctcaatgtatttgccgaccataccaatggtgacttcacttaccggattcgcttcttcgaagataacctgttcccattcggacagattcgcttccgggcagtttaagctgaatcgtttacaaatataatcgtccagcccctgagatttcaacaggcccggaattttatagatggaatcgacgtctttcagagaaataaccgctttttctggaacattacagaacaatgcaatcttcgcacgttcgttcgccggaacggcgcgatctgaacgacaaatcaggatatcaggctggataccgattgaaagcagctcttttacagagtgctgagtcggtttggttttgacttcaccagacgctgccatgtacggcaccagcgtcaggtgcataaacagggtgtgctcacggccaatttcaacagccatctggcgaatcgcttcgaggaacggcagggattcgatatcacctacagtaccgccgatttcgaccagtactacgtcatgaccttcgccgccttccagcacgcgctctttgatagcgttagtgatgtgcggaataacctgtacggttgcgccgagatagtcaccgcggcgttctttacgcagaacgtcagagtagatacgacccgtggtgaagttgttgcggcggctcattttggtacgaatgaaacgctcgtagtgccccaggtccaggtcggtttcagcgccgtcttcagtaacgaacacttccccgtgttggattgggctcatagtacctggatcgacgttgatgtacggatccagtttcatgatggtcacattgaggccacgggcttcaagaatggctgcgagggaggctgcggcaatgcctttacccagagaggatacgaccccgccggtcacaaaaatatagttcgttgtcatgctgaacctgagaagttaggttgaaaagacgatggaataaccaggacgggaaagcagtatacccgaacatgacctgtgccacaaactttcattatccctcctcttcgccagcgcactattgaaatcaggagtgagaaaatagcccctttggggtaaatgtttttgacgcaaatcaagcgcttgtcatttaaaaaatgacacaaatcgcgcttgaccgcgtaattcccttagagatcaatttcctgccgttttacctgttgccagacttcttccattgtttcgaggtcaacacctgtcatttccagtccacgcgcggcaacaatacgctccacttcgcgaaaacgacgctcgaatttttcgttcgctttttgcaatgcgatttccgcttttgtccctaaatgacgagccagattgaccgtggcaaacagcaggtcacccatttcctcctccagtttagcctggtcgacaacagcctgccgcgcctcgtacatcacctcgtcgatctcttcgtagactttatcgactaccggatcaagcgtcgtccagtcgaaaccaacgttggcgcaacgtttctggattttttgcgcacgcattaaagccggtaaactacgaggaatatcgtccagcgccgaatgctgcgctttctgcgcgcgctcttcggttttgatttgctcccaacgggcaagcacttcactactattttcggcagaactgtcagcaaaaacatgcggatggcgacgctctaatttatcgctaatagcagcgcaaatatcattaaagtcaaagcgcccttcttcctgagccatttgtgcgtaaaacaccacctggaacagcagatcgcccagttcaccgcgcagatcgtcaaaatcttcacgggcgatggcgtccagcacctcgtaggtttcttcaagggtgtaaggcgcaatggtggcaaatgtctgctctttatcccacgggcagccgttttccgggtcgcgcaggcgctgcatgatggtgagcaaacggtcgatttgattcattgaattgtcctgaaaattgcgggtccgtcagatgtaataccttcgagtaaaagatatcgctggatacggctgacgccatatccagctatgtaagattaactcccgtgcaaccgacgcgcgtcgataacatccggtacctggttgagtttacccagcacgcggcccagcacttgcaggttgtaaatctcaatggtcatgtcgatggtcgccagttgctgtttggtgtcgctacggctggcaacgccaagcacgttcaccttctcgttggcgagaatggtcgtgatatcacgtaacaacccactacgatcattagccaccacgcggaccaccagcgaatatccggcggagtagctctcaccccataccgcgtcaacaatgcgttctggcgcatgggagcgcagttccgccagttgttcgcaatcggcgcggtgtactgaaataccgcgtccctgagtaatgaaaccaactatttcatcaccaggaataggctgacagcagcgcgcgatgtggtgcatcaggttaccgacaccttcaaccaccacacgaccgttatctttactgcggttttgcggcgtgtagcttttttgctgaagttgcttcagcgcggcggcgtcctgctcttcggcactcggcttattaaattgcgattgcaggaagttcaccatctgattgagacggatatccccgccaccaatcgccgccagcaactcgtcgacatcattgaagttgtaacgcggcagcagatgtttttctgcttctttcaggctgatccccagatgttccagctcgtcgtcaaggatttgccgcccagccagaatgtttttgtcacggtcctgtttacggaaccaggcgtgaattttcgaacgcccacggctggttgtgacgtaaccgaggtttgggtttaaccagtcacggctggggttcggctgtttctgggtgataatttcaatctggtcgcccatctgcagctggtaggtgaacggcacaatgcgcccgccaatttttgccccgatgcagcggtgtccgacatcactgtggatgtggtaagcgaagtccagcggcgttgatcccgcaggcaaatcaacgacatcacctttcggcgtaaagacgtacactcggtcgtcaaagacctgactacgtacttcgtcgagcatttcgccggaatcagccatctcttcctgccacgcaatcagtttacgcagccaggcaatccggtcttcatgtcccgaacgtgcgccgccagcagccgcgccctctttatatttccagtgcgcagcaacacccaactctgcatcttcatgcatctgtttggtgcggatttggatctcaacggttttgccacccggccccagaaccacggtatgaatggactgataaccgtttggtttcgggttagcgacgtaatcgtcaaactcatccggcaggtggcgatagtgagtgtgcactatccccagtgcggcataacaatcctgtaaacgctcggcgacaatacgtaccgcacgcacatcaaacagctcatcgaaggcgaggttctttttctgcattttgcgccagatgctgtagatgtgtttcggtcgaccatacacttcagctttaacaccttcagctttcatctcagcgcgcagatggccgacaaactcttcgatatagtgttcgcggtcgagacggcgttcatgcagcagttttgcgatgcgtttgtattcggtcgggtgcagataacggaagcagtaatcttccagctcccatttcagttgcccaatcccaagacggttcgccaacggcgcgtagatattggtgcactcttttgccgccagtacgcgttcatcttccggcgcatcttttacttcgcgcaggtgagcaatacgctccgccagtttgatgaccacgcagcgaaaatcatcgaccatcgccaataacatccggcgaacgttatcgacctgttcggaggaaacagaatcagtgtgcgtcgctttcagctggcggatcgccgccatatcacgcacgccgtgaataaggttaacgaccgacttaccgacgctctcacgcagcacatcttcgctgactacgttggcatcagccagagggaacagcagcgccgcccgcagcgtgtcaatgtccatacttaatgtcgagaggatctccaccatctcaacaccacgccacaataacagactggcatccggatgcccctgcgtctgttgcagacaatacgcccaggtttcggctaagcactcacacgacttctggctggtaatacccagacttgcgatccatttttccggatcaaattcaccagccttattgatatgtgcacttcttaccgcaaccatcgtcctctcctttagggaccagacctgccgaaatcggcaaatcgtaactatttaacgcgcgagaaaagtaccatcgattccagatgtcccgtgtgtgggaacatatccagcatcgccagtcgcgcaatggtatatcctgcttttaataacgcttcgctatcccgagccagcgttgcagggttacaggatacataaactatacgaataggttccagttttataatttgctgcataacacctgcggcacctgctcgcgccgggtccaacaacactttatcgaagccgtttttcgcccacggctgctttgtgacatcttcttcaagattttcgtgataaaacgtcacattctgtaagccattaagacgcgcattctgctggcctttttccaccagcgccggaacaccttctacacccaccacactggcagcttgtgtcgccaatggcagtgtaaagttgcccataccgcagaacagatccagtacgcgatcttcaggttccacatccagccattccaacgcacgcgctaccattttctggttcacacccgcattgacctgaataaaatcgcgcgggctaaaagttaagcgcaacccatttgagtcataccagggcatctcaccagagacggtttcgagtatctcactatcgggggcgagatacagatccaggccttcagaatgcgaaaagcattccagtttttcgcgatctgccgaacttagcggtgcggtatggcgcaaaatcattagcgtgccgctggttgcctgtaccagttcaacatgaccaagatggcgcatagcttgtaagctgcccaggcatgccctgactttgggcagcaatgcttcaagttggggcactaaaatggggcattgtttcacgtcgacaatgtcactggagcccgctttgcgaaaccccatctgaagttgctgtgttttcggtaagtagttcagacttaaacgcgcgcgacggcgatagccccagggaacatcggcgatcacttcagagacttcgtgtttcattaatcgggcgagtgccgcacttttgcttcgctgctgtaaatccacactggcgtgttgttgctgacagccgccgcatacgccaaaatgaggacagcgtggcgtttcgcgttccgggctatcgcttaaccggcgtacgactttagcgcgggcatactgttttttatcttcagtaacagtaacttccgcgttttcctgcggcaataatccggggataaataatgttttgccgttatgtcgcgccacaccctgaccaaaagagtcgaggtcgttgactgaaacggttatgatctgacgcgtcgtcgtgcgtcgttttgcagagtagaattgcgccattggcgagactttctcaatttaacagtgtgaccttaattgtcccataacggaactccatgaccaactacagcctgcgcgcacgcatgatgattctgatcctggcaccgaccgtccttattggtttattgctgagtatctttttcgtcgtgcatcgctataacgacttgcagcgtcaactggaagatgccggtgccagcattattgagccgcttgcagtttctactgaatatggcatgagtctgcaaaatcgcgaatctatcggtcagttaataagcgtactgcatcgtcgccattctgatattgttcgcgcgatttcggtttatgatgaaaataaccgactctttgtcacctccaattttcatcttgatccctcatcaatgcagctcggcagcaacgtgccgtttcctcgccagctcactgtcactcgtgacggcgatataatgatcctccgcacgccgattatttctgaaagttactcccccgacgaatcgcccagtagcgatgccaaaaatagtcaaaatatgctgggatatattgcgctggagctggatcttaaatcggttcgcttgcagcaatataaagagatctttatttccagcgtgatgatgctgttttgtatcggtattgcgcttatttttggctggcgcttaatgcgcgatgtaaccggtccgattcgcaacatggtgaataccgtcgaccgcatccgtcgcgggcaactcgacagccgggtggaaggatttatgctcggcgagctggatatgctgaaaaacggtatcaactcgatggcaatgtcgctggcggcttatcacgaagagatgcaacacaatatcgaccaggcgacgtccgatctgcgtgagacgctggagcaaatggagattcagaacgttgagttggatctggcgaaaaagcgcgcccaggaagcggcgcgtattaaatccgagtttctggcaaatatgtcacacgagctgcgtacaccactgaatggtgttattggctttacccgcctgacgctgaaaacagaattaacaccaacgcagcgcgatcacctgaatacgattgaacgttcggcaaataatttgctggcaattattaatgatgttctcgacttctcgaaactggaagccggtaagctgattctggaaagtattccattcccactacgcagcacgctggatgaagtcgttaccctgctggcacattcttctcacgataaagggctggaactgacgctcaatattaaaagcgacgtgcctgataacgtgatcggcgacccactacgattacagcaaatcatcactaacctggtagggaatgcaattaaattcaccgagaatggcaacattgatattctggtagaaaaacgtgcgctgagtaataccaaagtgcaaattgaagtgcagattcgggataccggcattggtattcctgaacgcgatcaatcgcgcttattccaggccttcagacaggctgatgccagtatttcccgccgtcatggtggcaccgggctggggctggtgattacacaaaaactggttaatgaaatgggcggcgatatttcgttccatagccagccgaatcgcggttcaactttctggttccacattaatctcgatctgaacccgaacattattatcgaagggccatccacccagtgcctcgctggtaagcgcctggcctatgtcgaaccaaactccgcagcagcacaatgcacgctggatattttaagtgaaacgccgctggaagtggtttatagcccaacgttctccgcgctgcctcccgcgcattacgacatgatgttattaggcatagcggtgaccttccgcgagccgctaacaatgcaacatgagcgattagcgaaagcagtatcgatgaccgatttcctgatgctggcacttccttgccatgcacaagtcaatgctgaaaaacttaagcaagatggtatcggcgcgtgtctgctgaaaccattaacacctacgcgcctgttgcctgccctgacagaattttgtcatcacaaacaaaacacgcttttgcctgtaaccgatgaaagtaagctggcaatgacagtcatggcggttgatgacaaccccgctaacctgaaacttatcggcgcattgctggaagatatggtgcaacatgtggaactttgcgatagcgggcatcaggcggttgaacgggcgaaacagatgccgttcgatttaatcttaatggatattcaaatgccggacatggacggcattcgggcatgtgagctcatccaccagctcccgcatcagcagcaaacgccggttatcgcggtaacggcgcatgcgatggccgggcaaaaagagaaactgcttggcgcggggatgagtgattatctggccaaaccgatcgaagaagagcgattgcataatttgctgttgcgctacaagcctggcagcggtatttcctctcgcgtcgtgacgcccgaagtcaacgaaattgtggtcaacccgaatgcgaccctcgactggcaactggcactacgccaggcagcaggaaaaaccgatttagcgcgcgatatgctgcaaatgttactcgatttcctgcctgaagttcgcaacaaagttgaggaacagctggttggagaaaacccggaaggcctggttgatttgattcataaactgcatggcagttgcggctatagcggtgtaccgcgtatgaagaatctctgccaactgatcgaacaacagctacgtagcggtactaaagaagaagatttagagccggagctgctggaactgttggacgagatggataatgtagcgcgcgaagccagcaaaattctcgggtaatggacgtcttgtcgagtagcaaccggatttttatgacgctggtttcagattggtgacaagtgcctgtgtttatgccggatgcggcgttaacgccttatccggcctgcaaaaccaattaaattcaatgaattaaaaaatgatgtagccctgatacgtagcgcaacaggcaattttgcgtttggcatcagtctcaaaccggctccagatagagccggttttggttttctgtcttaacgcaccatgcacggacgcttgttatcgaacgtccagccggggatcaggtactgcattcccatcgcatcgtcacgcgcgccaagcccgtgtttctgatacagctcgtgcgctttcatcacttgatccatatcgatttctacacccagccccggtttttctggcacctgaaccagaccgcctttgatctctaacggttctttggtcaggcgctgattaccttcctgccagatccagtgcgtatcaatcgcggtgattttacccggtgcggcagcggcaacatgggtaaacatcgccagggaaatatcgaagtggttgttggagtgtgaaccccaggtcaggccaaattcatgacacatttgcgccacacgtaccgaaccttgcatcgtccagaaatgcggatccgcaagcgggatatcaacggattgcaacgagagcgtatggcccatctgccgccagtcggtggcgatcatattggttgcggtcggcaggccagttgcgcgacggaactctgccatcacttcacgcccggagaaaccttgctccgcaccacacggatcttctgcataagccagcgaacctttcaggtatgtaccgattttaatcgcttcgttcagcgaccaggcaccgttaggatcgagcgtaatacgcgcctgcgggaaacgttgcgccagtgccacaatagattcggcttcttcttccccggccagtacaccgcctttcagtttgaaatcgttgaagccatatttttcatacgccgcttccgccaggcgcaccaccgcatccggcgtcatcgcttcttcatgacgcaggcgataccagtcgcatgagtcatccggctggctttgatacggcagcggtgtagctttgcgattaccgacgaagaacagataaccgagcatttcgacttcgctacgctgttgaccatcgcccagcagcgatgccacgtttacccccagatgctgccccagcagatccagcattgccgcttctatcccggtaactacatgaatagtggtacgcaaatcaaatgtctgcaaaccgcgcccaccggcatcacgatcggcaaaagtattacgcaccagcgtcagaacgtttttgtattcacccagcgttttacccaccaccagcggaatcgcatcttccagcgttttacggattttctcgccgccgggaatttcccctacgccagtgtgaccggaattattttttgataatcacaaatattacgcgtgaagaacggtgcatgtgcaccactcagattcatcagcatactgtcatgacccgccaccgggatgacctgcatttcagtaacaacaggcgtcgtaaattgagaactcatatttatgtcctttttcagaatcaatgacggccgaaaacgggacgtttacggtcaaaggtccagccggggatcaggtactgcatcgggcctgcgtcgttacgcgcaccgccaggcagacgtttataggcctcatgtgccttttgtacctgttcccagtccagttccacgcccagaccgggcgcatcaggaacggcaatttttccgtttttaatctccagcggatttttggtcagacgacaatcgccctcctgccaaatccagtgggtatcgatagcggtaggattacccggtgccgccgcgcccacatgggtaaacatcgccagagagatatcaaagtggttattagaatggcagccccaggtcagcccccagtcgtcgcaaagttgcgccacgcggactgcaccggaaagcgtccagaagtgcggatcggcaagtggaatatctaccgcattgagcatcaccgcatgacccatttcgcgccagttggtggcgatcatgttggtcgcgacgggcaagccggtcgcccgtcgaaactccgccatcacttcacgaccggagaaaccctgctcagcgccgcacgggtcttccgcataggtaagaacatcatttagccctttgcacagagaaatggcttcatcaagcagccaggcaccattgggatcaacggtaatccgcgcatcagggaagcgtttcttcaatgtacggacagtgtcgatttcttgctcgccaggtaacacgccacccttaagtttgaaatctttaaagccatagcgatcctgtgaggcttccgccagacgcacaacggcttcgctgttcatcgctttctgatgccgcaactgataccactcatggttgcccggcgtattttccagataaggaagatcggttttggtccgatcaccgatataaaacagataaccgagaacggtaatagcatcacgttgcttgcctggccctaacagttcgcagaccggaacattcagcgcctgacctaacaggtcaagcaaggcggcttccagcgccgccacggcattaacgcgcaattcaaaagtccaggcacctttgccgaaggtatcaaaatcggctgcctgattacctttatgcacctgctgaaccactttattcaggcgcgcaacttcctggcccagcaccatcggaatagccttgaccagtgtttgataaatcacctctccgcccggcgcttcaccaatgccggtatacccggcattatcggtgagtaccacaatattgcgggtgaaatatgcgttatgtgcaccaccaatattaagcaacatgctgtcatgtccggcgaccggaatgactttcatatcagtaataacaggactggattgtgtcgtcatcttattgccccgcgacaggtttcagctcaatacgcttgatatcgcccaccagcaccaggtagctgagtaccgcgattaaggcatgaacaccaacataaatcagcgccccattaaaggagccagtcgtgccaacgatataaccaattgcgattggcgtgacgatgccagaaatgttaccaaacatgttaaacaggccaccggaaagaccgctgatctcttttggcgcagtatcagccattacagcccaacccagcgcaccgatccccttaccgaagaaggccagcgccataaagccgatgatcatccactcaacgttgacgtagttgcagaacaccatcaccatcgacagcaacatgcccatcacgatcggtgttttacgcgcaatgttcagtgaacccgtgcgacgcatcagccagtcggaaataatcccccccaacacaccgccgataaaaccgcaaaccgccggaacagaagccacaaagcctgctttcagaatcgacatcccgcgcgcctgcaccagataaaccgggaaccaggtaataaaaaagtaagtcagggcgttgatacagtactgaccgatataaacgccgatcatcatccgtgacccgagcagctgtttgatctgcccccacttcacgctgaacggcactttaactttggtgttttgctgatccatattgatcagcgcgccacccgtggcgatgtactccagctctttctgatttacgcccggatgttgatttggctcgtggatgactttcaaccagataaagctgatgacaatgcccagaccgcccataaagaagaagacgtgtgaccagcccacttcatgagtcaaccagcccataatcggcgcgaagataaccgttgcgaagtattgggcggagttaaaaatcgacaccgccgttcccctttcctgcgccggaaaccaggccgcaacaatgcggctgttgccagggaaagagggcgcttcagcaagcccgaccaggaagcgcagtgtaaacagggcaacgataatgccgaatccactaaagatatcgacgaagccttgcagcaaggtaaacatcgaccagataaagatcgaccagaagtagacgcgttttgaaccaaaacgatccagcaaccagccaccagggatctgcccgataacatacgcccatgagaaggcagagaacacatagcccattcccacgggatcaaggccgatatctttggccatttccgaaccggcaatagaaagcgtagcgcggtcgccgtagttgaaggatgtgacgataaacaacatcaccactatccagtaacgagcattcgtgcgtttttccacactgctcgcagcctgacttaaagaactcattgttgcactcctgaaaattcgcgttagccacgctcactctggactgcgacatcgcaggaaatcagaggtgacgtagggtgtttttgccgtttttataggtcgttcgccgaatacggcgcgtgtttatatctggcaatagcagtataaaaagcgcgccatagcggctcaccgtgcaacaacacaacattaatgcgttcaatgaggcccgattttggcattagccctggacggtggaatccacttcacggaaatgaaaacaagaacaagaaaggaagggttaaaacgaagaaataaagaagagtatgaaatggatcgcttgactccaggcaaacgccagtaaaaatccgcgctatgaagcagtttttactggcatttgcctgaaaagattcgattcagcaccgctaaaacggcatttaccgctcgctgaacatatcaggacaacatcgtgccccaatgttcaacccacggatttgattccgtttccggttccgggttctcactggcgtcaatcaacagcatttcgccaacccgctgagcgctctgttcctgcaacaaggcatcgaactgtttgccgccattgcagaaattcacataactactgtcgccgagcgcaatcacgccataacgcagattcggctggaagcccagactatctttgattccctgaaagagtggcacaatgctatcaggaaggtcgccctgcccggtcgtggacgtaaccaccagaacatacttatcctgatagggcagccagtcgcttaattcaggatcttcaaataccgttgctttgtggccctgcgcggtcagaatcgcttccgcttcttcggccactaacagtgaattcccgtacatggtgccgacaaaaataccaatttccgccataccgttttctccctggattaggaacttatctctccatcctgacccgatggcgcactgaactcaaccctttcattttcaggaagcagaccgcgccagccaaattgtgataatgcctgcatccaggtgtcgtccaggcccgcgtgaatagccagcggctcgccagtaaaaggatgcgtcaatgacaactgactggcatgcagcattaaccgctgaaggccaaaatgctcagcgccgctgcgattctggcgtaaatcaccatgtttgctgtcgccaataatcgggtgccgcaaatgggcaagatggcgacgaagctggtgcttgcgtccagttttcggctccagttccaccaggccgtagcgcgtggtcgggtaacgtccggtcgctaccggcatttctacggtcgccagaccgcgataatgcgtcactgctggctgcgggcctttatcttcgcgggcaaatttatcagcgattttgtccagttcttccaccagtggataatccagcaccgcttcttccatcaaccagccacgcacaatcgcatggtaacgtttctggatttggtgctgttcaaactgttgtgccagcagccgtccggcttcgctggataatcccatcaacaacacaccagaagttggtcggtccagacgatgagcagtaaaaacatgctggcctatctggtcacgcacggtttgcatgaccactactttctcgtcgcgatccagccagctgcggtgaaccagccagccggagggtttatttaccgcaaccagccattcatcctgatagagtatttccagcattagctcgcatcatccgcaaaaagagcatccagtttctccagctcagccaaaataagcgcgcgttgcggatgatcagtcgccagcgccatttcataatagggcgcaacagcaaaagcgcccggtaacggctggttgttatctaacaaatcgtgcattcgcgggatcagcacccactgcaaccactccagtggttccatggtgtccataaagaacggttgagtactgttaaattgatgcggcaggggttcatcgtttcgccagtgctgatgttcacgcagtaacgcttcaagcgcctgcaactggagacgaacgcggtcatgagtggtcataaagcaacctcaataagaaaaactgccgcgaagaatagcaggaataaaaaaagggagcactgtattcacagtgctcccggttcgtttcgcagcattccggctacttttgttgctccctgctcatccttgacaacttttcctctggccttgcggccaatcgttcatcctgaactattgcttcctgctcacaccaccccgatgtgatacttcatcctgaagtgttcctggccttcctgacccaccgaatcatcctgaccggttctcattctccatcctggaggtgtcctttaacgcgtcctgcgtcatcctcttcgcttcatccagaagcctttccctgaaacaccatcctggtgtgtccttcagaagtgtcatcatcctgatgttcacttcgtttgaagtggtttactgaatttggccacctgaacagaggtgatatgctcacctcagaacaacacaggtgccataatgaaaaaaagaaatttcagcgcagagtttaaacgcgaatccgctcaactggtcgttgaccagaattacaccgtggcagatgcagccagcgctatggatgtcggcctttccacaatgacgcgatgggtgaaacaattacgtgatgagcggcagggaaaaacaccaaaagcctcccctattaccccggaacaaattgaaatccgtgagctcaggaaaaagctacaacgtattgaaatggaaaatgaaatattaaaaaaggctaccgcgctcttgatgtcagactccctgaacagttctcgataatcgggaaactcagggcgcgttatcctgtggccactctctgccatgtgttcggggtccatcgcagcagctacaaatactggaaaaaccgtcctgaaaagccagacggcagacgggctgtattacgcagccaggtacttgaactgcatggcatcagccacggctctgccggagcaagaagcatcgccacaatggcaacccagagaggctaccagatggggcgctggcttgctggcagactcatgaaagagctggggctggtcagctgtcagcagccgacttaccggtataaacgtggtggtcatgaacatgttgctatccctaactaccttgaacggcagttcgccgtgaccgagccaaatcaggtgtggtgcggtgatgtgacctatatctggacgggtaagcgctgggcgtacctcgccgttgttctcgacctgttcgcaagaaaaccagtgggctgggccatgtcgttctcgccggacagcaggcttaccatgaaagcactggaaatggcatgggaaacccgtggtaagcccgtcggggtgatgttccacagcgatcaaggcagtcattatacgagcaggcagttccggcagttactgtggagataccggatcaggcagagtatgagtcggcgtggaaactgctgggataacagcccaatggagcgcttcttcaggagtctgaagaacgaatgggtgccggcgacgggctatgtaagcttcagcgatgcagctcacgcaataacggactatatcgttggatattacagcgcactaagaccgcacgaatataatggtgggttaccaccaaacgaatcggaaaatcgatactggaaaaaactctaactcggtggccagtttttgttgaccacttcagttgtctgactccctgtcgacgaagatagaatcgtctttttctcgaagtcttacaaggcgcttacagacaatgccttaaggaaaatttcatatgaaagttaagaattaacaagcaacatgttgtttttaaatgagaataacgattcttatctttttaagtattcgcttatttcctggcgatctcctacagagtctgtaagagatctctcacaaccagatggggtatttggattacagaagaggcttaagttgattaaggaattccgcaagatttgaggctaaatgcgtccgtttacgtgttcctagcgtctctttgcacacttcaccggagagattacacaccgagatgacctctaactcttcttccagcgtcgcgataaatagcgtgggcggcagttttagccttttctgagtcaccagatgaccaatcagattttcctgcacccgacggaagtcgtcttcactccaggtttgcagcaatgtcagtttgatatcgccaaactgcgcgtgcatatccccggcaaactgagtcgtataaaaggtatgaatcgtgggttgtatcacaatatcaaaagcgcgttcaaccgcgtttacattttgttccccggtaaacggctggggttgccagtatacggcatcttcggtagttgaaataatgcacggtgaaggaacgccgtacagttcctcacttaacggccagcttttatgctcttcatgccacgcatcgcagtagcgtgcagtaaaatctttcagggcttgtgcggtcaaatcgtccactaatttctctcttcacttaaaccagatacacttgtcgtttagtttatctggtttatgacggtgaaacatgtcttcttatgcaaaccatcaggcacttgcgggcctgactcttggaaaatcaaccgattaccgggatacctatgacgccagcctactgcaaggcgttccacgcagcctgaatcgcgacccgctgggtctgaaagcggataacctgccttttcacggtacggatatctggacgctgtatgaactttcctggctgaatgcgaaaggtttgccgcaggtcgctgtcggtcatgttgaacttgattacaccagcgtaaatctgattgagtcgaagagttttaagctctatctcaacagttttaaccagacgcgttttaataactgggatgaggtgcgccagacgctggagcgcgacttaagcacttgcgcccagggtaaggttagcgtggcgttatatcgtcttgatgaactggaaggccagccgataggtcatttcaatggcacctgcattgatgaccaggatatcactatcgataactatgaattcactactgactatctggagaatgccaccagcggtgaaaaagtagtggaagagacgcttgtcagccacctgctgaaatcaaactgcctgatcacccatcaaccagattggggttcgatccaaattcagtatcgtggacgccaaattgacagagaaaaactgctgcgttacctggtctctttccgtcatcacaacgagttccacgaacagtgcgtggaacgcatctttaatgacctgttacgcttctgccagccagaaaaattgagcgtttacgcacgttatacccgtcgtggcggtctggacattaacccgtggcgcagtaataacgattttgtcccatcgaccacaagactggttcggcaataaattttttctcaattttgcgtgctggattcacgcagaaggttgtgaaaggtcagcaggcagggctattgtaatcaaagggaatgacgatattcgtcccataaggagtttttcttgattacacatattagcccgcttggctccatggatatgttgtcgcagctggaagtggatatgcttaaacgcaccgccagcagcgacctctatcaactgtttcgcaactgttcacttgccgtactgaactccggtagtttgaccgataacagcaaagaattgctgtctcgttttgaaaatttcgatattaacgtcctgcgccgtgaacgcggcgtaaagctggaactgataaatcccccggaagaggcttttgtcgatgggcgaattattcgcgctttgcaggccaacttgttcgcggttctgcgtgacattctcttcgtttatgggcaaattcataacaccgttcgttttcccaacctgaatctcgacaactccgtccacatcactaacctggtcttttccatcttgcgtaacgctcgcgcgctgcatgtcggtgaagcgccaaatatggtggtctgctggggcggtcactcaattaacgaaaacgagtatttgtatgcccgtcgcgtcgggaaccagctgggcctgcgtgagctgaatatctgcaccggctgtggtccgggagcgatggaagctccgatgaaaggtgctgcggtcggacacgcgcagcagcgttacaaagacagtcgctttattggtatgacagagccgtcgattatcgccgctgaaccgcctaacccgctggtcaacgaattgatcatcatgccagatatcgaaaaacgtctggaagcgtttgtccgtatcgctcacggtatcattatcttccctggcggtgtgggtacagcagaagagttgctgtatttgctgggaattttaatgaacccggccaacaaagatcaggttttaccattgatcctcaccggcccgaaagagagcgccgactacttccgcgtactggacgagtttgtcgtgcatacgctgggtgaaaacgcgcgccgccattaccgcatcatcattgatgacgccgctgaagtcgctcgtcagatgaaaaaatcgatgccgctggtgaaagaaaatcgccgcgacactggtgacgcttacagctttaactggtcaatgcgcattgcgccagatttgcaaatgccgtttgagccgtctcacgagaatatggctaatctgaagctttacccggatcaacccgttgaagtgctggctgccgacctgcgccgtgcgttctccggtattgtggcgggtaatgtaaaagaagtcggtattcgcgccattgaagagtttggtccttacaaaatcaacggcgataaagaaattatgcgtcgtatggacgacctgctacagggttttgttgcccagcatcgtatgaagttgccaggctcagcctacatcccttgctacgaaatctgcacgtaatctcccctcccccggtgacgtttgttgccgggttttctcgtttttggtcacttactcatcaactcatttcatttgttatatgaatgtttcctaccaccctcacgcgacaaatatcaccacagttaatatgtcatacaatttatgttgaaacgcaaacgtttccctattttcataaaccacattttatcgccatgaaaaagaaattatcgccatgattaactaaaagtattgattttttcagttcaacctacatatattgcgcgccccgtaagaagtcagatgtcgtttaatgggtaaatattgcccttaaattctcttttacttttgatttacagagtaaagcgttgggattatctatcttccaagtagattattgtatttgggatcaagatcactgatagatacataacttgtgtgtatctttccgccctcaaattattacggtggaaaatgattaagccatcgccgatagacagatttcatttttacggtcaggcaccttcccgggctgaactggctaaaagctgaattatttgcattcctccaggagaaatagatggaaacgactcaaaccagcacgattgcgtcgaaagactctcgtagtgcctggcgcaagacagacaccatgtggatgctgggcctttacggcacggcaatcggcgcgggcgtgctgttcctgccaatcaacgctggtgttggcggtatgatcccgctgatcatcatggctatccttgcgttcccgatgacgttttttgctcaccgcggcctgactcgcttcgtactgtctggtaaaaacccgggcgaagacatcaccgaggttgtagaagaacactttggtattggcgcaggtaaactgattaccctgctctacttcttcgctatctacccgatcctgctggtttatagcgtggcaatcaccaatacagttgaaagcttcatgtctcaccagctgggtatgacgccaccgccgcgtgcgattctgtcgctgatcctgatcgtgggtatgatgaccatcgttcgcttcggtgagcaaatgatcgttaaggcgatgagtattctggtattcccgtttgttggcgtactgatgctgctggctctgtacttgatcccgcagtggaacggcgcagcactggaaacgctgtctctggacactgcatctgcaaccggaaacggtctgtggatgacactgtggctggcaattccggtaatggtgttctcgttcaaccactctccgatcatctcttctttcgccgttgcgaagcgtgaagagtacggcgatatggcagaacagaaatgctcgaagatcctggcattcgcacacatcatgatggtgctgaccgtaatgttcttcgtcttcagctgcgtactgagcctgactccggcagacctggctgcggctaaagagcagaacatctcgattctgtcttacctggctaaccactttaacgcgccgatcatcgcgtggatggctccgattatcgcgattatcgctatcaccaaatccttcctcggccactacctgggcgcacgtgaaggcttcaacggtatggtgattaaatctctgcgtggtaaaggtaagtctatcgaaatcaacaagctgaaccgtatcactgcgctgttcatgctggtaacgacctggattgttgccaccctgaacccgagcatcctgggtatgattgaaaccctgggcggcccaatcatcgcgatgatcctgttcctgatgccgatgtacgcaattcagaaagtaccggcaatgcgtaaatacagcggtcacatcagcaacgtattcgttgtcgtgatgggtctgattgcaatctccgcaatcttctactctctgttcagctaagtcctttcgcgccgctttcgggcggcgcttcctccgttttaacgcgatgtatttcctatgattagcgtattcgatattttcaaaatcggcattggcccttccagttctcataccgttggaccaatgaaagcgggtaaacaatttaccgacgatctgattgcccgtaacctgcttaaagacgtgacccgcgtggtggttgacgtgtacggctcgctctctctgaccggtaaaggccaccacacagatatcgccataattatgggtctggcgggtaacctgccggataccgtggatatcgattccatccctggttttattcaggatgtgaatactcatggtcgcctgatgctggcaaacggtcagcatgaagtggagttcccggttgatcagtgcatgaacttccatgccgacaacctttctctgcatgaaaacggtatgcgcattaccgcgctggcgggcgataaagtcgtttacagccagacttattactctatcggcggtggctttattgttgatgaagaacattttggtcagcaggatagcgcaccggttgaagttccttatccgtacagttcagcagccgatctgcaaaaacattgtcaggaaaccgggctgtcactctctggcctgatgatgaaaaacgagctggcgctgcacagcaaagaagagctggaacagcacctggcgaacgtctgggaagtcatgcgtggcggtattgagcgcggtatttctaccgaaggcgtgttacctggcaaactgcgcgttccacgccgtgctgcggcactacgccggatgctggtcagccaggataaaaccaccactgacccgatggcggttgttgactggatcaacatgtttgcactggcagtgaacgaagagaatgctgctggcggtcgcgtggtgactgcgccgactaacggtgcgtgcgggattattccggccgtgctggcgtactacgacaagtttatccgcgaagtgaacgctaactcactggctcgttacctgctggtagccagcgccattggttctctttataagatgaacgcctcgatttctggtgccgaagtcggctgccagggtgaagtcggcgtggcgtgctcaatggcggcagctggtctggcagaactgttaggcgcaagcccagcgcaggtatgcatcgcggcggaaatcgccatggagcacaacctcggtctgacgtgtgacccggtcgccgggcaggtacaggtgccgtgcatcgagcgtaacgccattgcggcagtgaaagcagtaaacgctgcacgtatggcgctgcgccgtaccagcgagccacgcgtctgcctcgacaaagttatcgaaaccatgtacgaaacaggtaaagatatgaacgccaagtaccgtgaaacgtctcgcggcggcctggcaatgaaaatcgttgcctgcgattaatcgctctccagaggcctctttttgcgaggcctcttcccgatttctcatccagccatagcctgttctggcatcgaatgttacccttatcgcctgatctttaagggggttatcgtggctgttcatttgcttattgtcgatgcactgaatcttattcgtcgcattcatgccgttcagggttcgccctgtgtcgaaacctgccagcacgcgctcgatcagctcattatgcacagccagccaacccacgcggtcgccgtttttgatgatgaaaaccgcagtagcggctggcgtcatcagcgtttaccagattacaaagcgggtcgaccgccaatgccggaagagttgcacaacgagatgcctgcattacgcgccgcctttgagcaacgcggcgtcccgtgctggtccgccagcggcaacgaagccgatgacttagccgccacgctggcggtcaaagtgacacaggccgggcatcaggcaacgattgtttcgacagataaaggctactgtcagttactttcaccgacattacgtattcgtgattacttccagaaacgttggctggatgcgccatttatcgataaagaatttggcgttcaaccgcagcagttgcccgattactgggggcttgcggggatcagcagttcaaaggtaccgggtgttgcagggatcggaccaaaaagcgccacacagctactggtcgagtttcagagtctggaagggatatatgagaatctggatgcggttgccgaaaagtggcgcaaaaaattagaaacccataaagagatggcgtttctgtgccgcgatattgcccgcttacaaaccgatttgcatatcgacggcaatttacagcaattgcggttggtaaggtaacggcgtgccggatgcaaacgattatcaacacattgaatttaatgcacttatatgccggataagacgcggctagcgtcgcatccggcattatcacatcagcgcatttaccaggcggtatggtaaagctctacaatatcctcaagcgttgcttcacgcgggttgccaccggtacaaacatcatccagtgccgcctgcgccagtgccggaatgtcttccttgcgtacaccaacatcacgtaaatgtggcggaataccgacatcacggttgagagcaaacaccgcttcaacagcggcattacgcgcctcttccaggctcataccttccactttcacgcccataacgcgcgcgatatcgcggtacttctcaccggtaaagtcagcgttatagcgcatgacatgcggtaacaggatggcatttgcaacaccgtgtggcgtgttgtaaaacgcgcccagtggatgcgccataccatgcaccaaccctaacccaacattcgagaatcccatacccgcaacatactgcccgagcgccatttcttctccggcatccttatcaccagcaaccgatcctcgcagcgccccagcaatgatttcaatcgctttaatgtgcagcgcatcggttagcgcccacgcgccacgggtaatatacccctcaatagcatgagtgagcgcatcgacacccgtcgcggctttcagcgctggaggcataccatccatcatgtcagcgtcaataaacgccacctgcgggatatcatgcggatcaacgcaaacaaacttgcgccgtttctcttcgtcagtgatcacgtagttaatggtcacttctgccgcagtgcctgctgtggtggggattgccagaatcggtacactgggtttattggtcggggaaagcccttccaggctacgcacatcggcaaactccgggttgttgctgataatgccaatcgctttacacgtatcctgtggagaaccaccaccaatagcgatcaggtaatccgcgccgctattctggaatacatcgagcccttctttgacgacagtaattgttgggttaggtactacgccgtcgtaaatcgcccatgccagtcctgccgcatccatcttatcgatcactttcgccaccacgccgcattgcaccagcgttttatcggtgacgatcagcgccttctgataaccacggcgtttcacctcatcggttaaagacccaacagccccccgaccaaaccatgccgtttcgttcagaatcattctgttagccatcatccttctccttgttgctttacgaaattactcttcaatccgtaacccgtaggttttgaatttctccagcactacggcaatctcttcatcgctcagcactggcaccgggtccgtaatcgccagggtcgtcaggtaaagttgtgccagcacttcaacttcatgcgccagccataacgctttctccagattcgcctcacaagcgataagcccatgatgttgtaacaaagttgccttacgatttttgagagccagcgcaacatgttcagaaagttcgcgtgttccaaaggtcgcataaggcgcgcaaggaatagaattaccgccagccgccgcaatcatgtagtgaatcgcggggatcggtcggttaagaatggaaactgccgtacaatgaacggcatgattgtgaacaaccgcgttggcatccggtctgctttgataggccgccatatggaaacgccactcgcttgaggggagttttccttcctcatgtttgccgttgccatcaataaagacaatatgcgactccgtcagtttttcatatggaatacctgtaggcgtaatcagcatcccatcctgataacgtacactgacgttacccgctgtcccctggttcagccccaggcgagtcatttccaggcaagtgtcaataatctgacgagcaagtttatttcgttccattagctacctctctctgattcaaaacagggcaataatgttgttcctttcacactattgaattagccgtttaattacccaccatcttcttcctgattaaccagaaagaaattcacaagcttatattttgtgacctggttcaactaatcacagtaaataactgcaagttctctttttataactccattaaaaatgaccgctcttaaaaatatttatcaaaacggtcatttttctactcctccctgccaggaatgcccgttttcggcacaaacaattaatacggtcatctggtttgtgttttttatgatttattttctgaaacgggcatgaaatttcgattattaaagtgatggtagtcacataaagtcaccttccggctaataagtgtgaccgccgtcatattacagagcgttttttatttgaaaatgaatccatgagttcatttcagacaggcaaatattcactgatatgaagcccgaactcgctggttttgcacttttgaaaacataaccgattacgtgcttaagcttctgaacctaagaggatgctatgggaaacacatcaatacaaacgcagagttaccgtgcggtagataaagatgcagggcaaagcagaagttacattattccattcgcgctgctgtgctcactgttttttctttgggcggtagccaataaccttaacgacattttattgcctcaattccagcaggcttttacgctgacaaatttccaggctggcctgatccaatcggccttttactttggttatttcattatcccaatccctgccgggatattgatgaaaaaactcagttataaagcagggattattaccggattgtttttatatgctttcggcgctgcattattctggcccgccgcagaaataatgaactacaccttgtttttagttggcctatttattattgcagccggattaggttgtctggaaactgccgcaaacccttttgttacggtattagggccggaaagcagtggtcacttccgcttaaatcttgcgcaaacatttaactcatttggcgcaattatcgcggttgtctttgggcaaagtcttattttgtctaacgtgccacatcaatcgcaagacgttctcgataaaatgtctccagagcaattgagtgcgtataaacacagcctggtattatcggtacagacaccttatatgatcatcgtggctatcgtgttactggtcgccctgctgatcatgctgacgaaattcccggcattgcagagtgataatcacagtgacgccaaacaaggatcgttctccgcatcgctttctcgcctggcgcgtattcgccactggcgctgggcagtattagcgcaattctgctacgtcggcgcacaaacagcctgctggagctatttgattcgctacgctgtagaagaaattccaggtatgacagcaggctttgccgctaactatttaaccggaaccatggtgtgcttctttattggtcgtttcaccggtacctggctcatcagtcgcttcgcaccacacaaagtcctggcagcctacgcattaatcgctatggcactgtgcctgatctcagccttcgctggcggtcatgtgggtttaatagccctgactttatgcagtgcctttatgtcgattcagtacccaacaatcttctctctgggcattaagaatctcggccaggacaccaaatacggttcgtccttcatcgttatgaccattattggcggcggtattgtcactccggtcatggggtttgtcagtgacgcagcgggcaacatccccactgccgaactgatcccggcactctgcttcgcagtcatctttatctttgcccgtttccgttctcaaacggcaactaactgaacatattttccgaataaagtgaggaatcagtaatgaaaaaaatcagcttaccgaaaattggtatccgcccggttattgacggtcgtcgcatgggtgttcgtgagtcgcttgaagaacaaacaatgaatatggcgaaagccacggctgcactgctgaccgagaaactgcgccatgcctgcggagctaccgtcgagtgtgtcatttccgatacctgtatcgcgggtatggctgaagccgctgcttgcgaagaaaaattcagcagtcagaatgtaggcctcaccattacggtaaccccttgctggtgctatggcagtgaaaccatcgatatggatccaacccgcccgaaagccatttggggctttaacggcactgaacgtcccggcgctgtttacctggcagcggctctggcagctcacagccagaaaggcatcccggcattctccatttacggtcatgacgttcaggatgccgatgacacatcgattcctgccgatgttgaagaaaaactgctgcgctttgcccgcgccggtttagcagtcgccagcatgaaaggtaaaagctatctgtcgctgggcggcgtttcgatgggtatcgccggttctattgttgatcacaacttctttgaatcctggctgggaatgaaagtccaggcggtggatatgaccgaactgcgtcgccgtatcgatcagaagatttacgacgaagccgaactggaaatggcgctggcctgggctgataaaaacttccgctatggcgaagatgaaaataacaaacagtatcaacgaaatgccgagcaaagccgcgcagttctgcgcgaaagtttactgatggcgatgtgtatccgcgacatgatgcaaggcaacagcaaactggccgatattggccgcgtggaagaatcacttggctacaacgccatcgctgcgggcttccaggggcaacgtcactggaccgatcaatatcccaatggcgacaccgccgaagcgatcctcaacagttcatttgactggaatggcgtgcgcaaaccgtttgtcgtggcgaccgaaaacgacagtcttaacggcgtggcaatgctaatgggtcaccagctcaccggcaccgctcaggtatttgccgatgtgcgtacctactggtcaccagaagcaattgagcgtgtaacggggcataaactggatggactggcagaacacggcatcatccatttgatcaactccggttctgctgcgctggacggttcctgtaaacaacgcgacagcgaaggtaacccgacgatgaagccgcactgggaaatctctcagcaagaggctgacgcttgcctcgccgctaccgaatggtgcccggcgatccacgaatacttccgtggcggcggttactcttcccgcttccttaccgaaggcggcgtcccgttcaccatgactcgtgtcaacatcatcaaaggcctgggaccggtactgcaaatcgcggaaggctggagcgtggaattgccgaaggatgtgcatgacatcctcaacaaacgcaccaactcaacctggccaaccacctggtttgcaccgcgcctcaccggtaaagggccgtttacggatgtgtactcggtaatggcgaactggggcgctaaccacggggttctgaccatcggccacgttggcgcagactttatcactcttgcctccatgctgcgtatcccggtatgtatgcacaacgttgaagagaccaaagtgtatcgtccttctgcctgggccgcgcacggcatggatattgaaggccaggattaccgcgcttgccagaactacggcccgttgtacaagcgttaatacatgactccctgatgtgatgcccggtcgctccggctaccgggcctgaacaagcaagagtggttagccggataagcaatgttatccggctatattgcaggagcgattatgaaacaagaagttatcctggtactcgactgtggcgcgaccaatgtcagggccatcgcggttaatcggcagggaaaaattgttgcccgcgcctcaacgcctaatgccagcgatatcgcgatggaaaacaacacctggcaccagtggtctttagacgccattttgcaacgctttgctgattgctgtcggcaaatcaatagtgaactgactgattgccacatccgcggtatcgccgtcaccacctttggtgtggatggcgctctgctagataagcaaggcaatctgctctatccgatcattagctggaaatgtccgcgaacagccgcggtaatggaccatattgaacggttgatctccgcacagcagttgcaggctatttctggagtcggagcctttagtttcaatacgttatataagttggtgtggttgaaagaaaatcatccacaactgctggaacgcgcgcacgcctggctctttatttcgtcgctgattaaccaccgtttaaccggcgaattcactactgatattacgatggccggaaccagccagatgctggatatccagcaacgcgatttcagtccgcaaattttacaagccaccggtattccacgccgactcttccctcgtctggtggaagcgggtgaacagattggtacgctacagaacagcgccgcagcaatgctcggcttacccgttggcataccggtgatttccgcaggtcacgatacccagttcgccctttttggcgctggtgccgaacaaaatgaacccgtgctctcttccggtacatgggaaattttaatggtccgcagcgcccaggttgatacttcgctgttaagtcagtacgccggttctacctgcgaactggatagccaggcagggttgtataacccaggtatgcaatggctggcatccggcgtgctggaatgggtgagaaaactgttctggacggctgaaactccctggcaaatattgattgaagaagctcgcctgatcgcgcctggcgcagatggagtgaaaatgcagtgtgatttattgtcgtgccagaacgctggctggcaaggcgtaacgcttaataccacgcgggggcatttctatcgcgcggcgctggaagggttaaccacgcaattacagcgcaatctacagatgctggaaaaaatcgggcactttaaagcctctgaattattgttagtcggcggaggaagtcgcaacacattgtggaatcagattaaagccaatatgcttgatattccggtaaaagttctcgacgatgccgaaacgaccgtcgcaggagctgcgctgtttggttggtatggcgtaggggaatttaacagcccggaagaagcccgtgcacagattcattatcagtaccgttatttctacccgcaaactgaacctgaatttatagaggaggtgtgaaatgctgaaaacaatttcgccgttaatttctcccgaactattgaaagtgctggcagagatggggcatggagatgaaattattttttccgatgctcactttcccgcccattcgatgggaccgcaggtgatccgcgctgatggcctgttggtgagcgacttgctccaggcgattatcccgttatttgagctggacagttatgcaccaccgctggtgatgatggcggcggtagaaggtgacactctcgatcctgaagtagaacgacgttatcgtaatgcgctttcactacaagccccctgtcctgacatcatccgcatcaatcgttttgcgttttatgaacgggcgcaaaaagcctttgcgatcgttatcacaggcgaacgagcgaagtacgggaatattcttttaaaaaaaggggtaacaccgtaatctcataccggtacgcccgcatgacgcgggcggttatcgaatgatggggtgaaaaatatgaaagcggcacgccagcaagcgatagtcgacctgctgctgaaccataccagcctgaccacggaagctctctctgaacagctaaaggtcagtaaagaaaccattcgtcgcgatctcaatgaattacagacgcagggtaaaattctgcgcaatcatgggcgcgctaaatatatccaccgtcaaaatcaagacagtggcgatccctttcacatccggctgaaaagccattatgcgcataaagcagatatcgcgcgcgaggcgctcgcgtggattgaagaagggatggtgatagccttagacgccagttcaacctgctggtatctggcacgccagttgcctgacatcaacatccaggtcttcaccaatagccatccgatttgccatgaactcggtaaacgcgaacgcattaaactgatcagttccggcggcacacttgagcgcaaatatggctgttacgtcaatccctcgctgatttcccaacttaaatcgctggaaatcgatctgtttattttttcttgtgaagggatcgatagcagcggcgcactgtgggactccaatgccatcaacgctgattacaaatcaatgttattaaaacgtgccgcgcaatcgttgttattgattgataaaagtaaatttaatcgttcaggggaagcccgcatcgggcatctggatgaggtaacgcacattatttctgatgagcgccaggttacaacttctttggtaacagcctgacggaaagggtagcaggccggagacgacgccccggccttacctgttatcgctcgtcgcgacgaccacccaccgcagcccagatacggcggacgtgcaccgtcacttcttcgcgatcgtgatacaactgccgcgcctgaatctgagcatttatgccatgttcatcaagctgtgcctgaatatacgccagattgtgtgacacttcttcgtagcgttttttcatcggcagtttgagattgaagatagtttcacggcaccagccattaaccagccactgcgccattaatgccgcaactttcgccggtttttcaaccatatcgcataccatccaggagatattgctgcgtgtcggacggaatttgaaaccgtcttcccgcagccacgtcacctgcccggtatccatcagactttgcgccatcgggccgttgtcgacggaataaacccacatgttgcgcttcaccagttggtaggtccagccgcctgggcaagcacctaaatccaccgcccacatcccgttcgccaggcgttcatcccactcatccgcgggaataaacacatgaaatgcctcttccagtttgagcgtggaacgactcggcgcatctgccggaaatttcaggcgcggaatgcccatatagaacggcgaattattgctgctgtatgagtaaccagtatagcaacagcctggtgcaataaagaatacatgcacaaccggacgcttcggcgtttcatagttcgccagcacccccgcatcacgcaaggcagcgcgtagcggcacggtgaatttacggcagaatttcagcaactctttgctttcgttggtatcggcaacttcaacacgcagttcaccgcccttctctactacgccctgtaacatgccgacaatgggggtaatacgatcttctggcggcaaatgctgcaggagttcccccactacaaaccactggcgggcaaaaattaatgaactgaacggcagctcacggattaacttatcgccatcatcaggttgataacattcataaatgacataacccgcattctctttcacgcgggcaaaaccgaaaatttcccgctggccggctttatcggtaatttctgcggcgcactctttttcaaagcccggacggcacagcaatacaaccttattcatgacttacgcccttgcgctttaaacggatagcaccaactaacattaacgcccagcccgcaaggaagctcacgccgccaaccggtgtgacaaacgcccacaaacgcagatgggacagcgccaggcaataaaggctgccgctgaacagcaccgtgcctaacgcgaggaaaacgctactccagtaaaaccagatactgatgcgacgctgcattgccaccgccagacctaagatcgccagcgtatgaaacgcctggtattcgaggccggtctggatccagcccatctcaacggcccccatggttttacttaacacatgcgcgccaaaagcgcccagagctacaaaaatgaagccgctaatggcggcgaaaatcagcataaaacggctggtcatggtcgtaccctacgtaaattattgttcataacgaaagcggaatttttcttgttcagcagcggctttcgccaggatccattggcgaaaggcggctattttacccagttctgcctggctgtcatgacaaaccagataaaaagcgtttttactgaccagaacatcattaaacgggcaaacaagacgtccggcctcgatttcagattgcgccatcacgttatttgccagcgccactccctgcccgtggatagccgcttgcagcaccatggcgctatggctaaaaattggcccttgctgaacgttgatatgatttaaccccaactgtcgggtatatgtctgccagtcacggcgtgacgcatcatgtaataacgtatgtttagccagatcttccggggtcttcaagggtttttcgccagtcagcagtagcggcgagcacaccggcaataaatattcggcgtacagtttttccacccgtagccccggccagttgccccgaccataaaatatcgccacatcaacatcatccgccagcttatcttcctgacgatcaaccgcctggattcgaacgtcaattcccggataagctgaattaaagctggaaagtcgcggaaccaaccaatgaatggcgaaactggggagtaaactgaccgtcaacgcccccttagcgctacgggcctggagtttacgcgtcgcttcggttaattgcgaaaatatctctttgatatcgaggaaatagctttgcccttcctcggtcagcaggagtgaacgattacggcggcggaacagttttagccccagaaaatcctcaagagacttgatttgatgacttactgcggcctgggtcacaaaaagctcttctgctgcgcgagtgaaacttaaatggcgtgctgcggcatcaaaaactcgtaaggcatttagcggtggtaatcgtttagacatggcttttaaactttgatgttaaatgaatttaacaattagattacactatgtaacctattagtttttttaatctgagccattataaattgtccgttgagcttctaccagcaaatacctatagtggcggcacttcctgagccggaacgaaaagttttatcggaatgcgtgttctggtgaacttttggcttacggttgtgatgttgtgttgttgtgtttgcaattggtctgcgattcagaccatggtagcaaagctaccttttttcacttcctgtacatttaccctgtctgtccatagtgattaatgtagcaccgcctaattgcggtgcttttttttaccttgcgatcgcgaattactgatccagttcgaccatctctttcacgtcggtacggttgatctgctgtttgttgccattagcgtctttatacgaaatcataccggtatcgttatcagtctgtggtttgccgtcagagacgatggtacgtccgtcattggtgtgcatcacatagttcgaaccggaacaggcgctcagggcaaaagtcagcatacaggcagaaataattgcggcagtctttttcatcatcttctccttaaagcgattaataaatcttaatagtattgattaacaggctaaaattaacgcctaacactattcagcatatgttactgacgcggcttcgccaggatatccagataattctgatggttagcactctccttgtatcaaagtgaattttgcgtcacgatcggtgcatcaagccgaggagtaccatgaacgtttttaatcccgcgcagtttcgcgcccagtttcccgcgctacaggatgcgggcgtctatctcgacagcgccgcgaccgcgcttaaacctgaagccgtggttgaagccacccgacagttttatagcctgagcgccggaaacgtccatcgcagccagtttgccgaagcccaacgcctgaccgcgcgttacgaagctgcgcgggaaaaagtggcacaattactgaatgcatcggatgacaaaaatatcgtctggacgcgcggcaccactgaatccatcaacatggtggcgcaatgctatgcccgtccgcgtctgcaaccgggcgatgaaattattgtcagtgtggcagaacaccacgccaacctcgtcccctggctgatggtcgcccaacaaacgggggccaaagtggtgaaattgccgcttaatgcgcagcgactgccgaatgtcgatttgttgccagaactgattactccccgtagtcggattctggcgttgtgccagatgtcgaacgtcactggcggttgcccggatctggcgagagcgattacttttgctcattcagccgggatggtggttatggttgatggtgctcagggggcggtgcatttccccgcggatgttcagcaactggatattgatttctatgctttttcaggtcacaaactgtatggcccgacaggcatcggcgtgctgtatggcaaaccagaactgctggaagcgatgtcgccctggctgggcggcggcaaaatggttcacgaagtgagttttgaaggcttcacgactcaatctgcgccgtggaaactggaagcaggaacgccaaatgtcgctggcgtcataggattaagcgcggcgctggaatggctgacagattacgatatcaaccaggccgaaagctggagccgtagcttagcaacgcttgcagaagaagcgctggcgaaacgtccaggctttcgttcattccgctgccaggattccagcctgctggcctttgattttgcgggtgttcatcacagcgatatggtgacactgctggcggagtacggtattgccctgcgcgccgggcagcattgcgctcagccgctactggcagaattaggcgtaaccggcacactgcgcgcctcatttgcgccatataatacaaagagtgatgtggatgcgctggtgaatgccgttgaccgcgcgctggaattattggtggattaatgacaaacccgcaattcgccggacatccgttcggcacaaccgtaaccgcagaaacgttacgcaataccttcgcaccgttgacgcaatgggaagataaatatcgccagttgatcatgctgggaaaacagcttccggctttgccagaggagttaaaagcgcaggctaaagagattgccggatgcgaaaaccgcgtctggctgggatataccgtggctgaaaacggcaagatgcatttctttggcgacagcgaagggcgcattgtgcgcggcctgttggcggtgttgttgactgccgttgaggggaaaaccgccgccgaattgcaggcacagtcgccgctggcattgtttgatgagctgggattacgtgcgcaacttagcgcctcacgcagccaggggttgaatgcgttaagcgaggcgattatcgctgcggcgaagcaggtttaagcacagaaccaggtcggataagacgttcgcgtcgcatccgacctgattgtttacccctgacgcgccgctttcgccatcatcttcttcagcgcatgagaaaccgcaacaaagccaaaagtggcggtcaccatcgtcgccgcgccaaatcctgaggcacaatccatccgctttggcccttccgccgtggctttcatcgcacagacggtgccgtctgactgcgggtacaccagcgcttcggtagagaacacgcaatccacgccgagcttacctttactgtttttcactacgccaaaatcgcttttcaggcgctcgcgcaacttcgccgccaacgggtcctgaatcgttttcgccagatcggtaacctgaatctgcgtcgggtcaatctgcccaccagcgccaccggtcgtgaccagcgggattttattgcgccgacaataagcaatcagcgccgctttgggccgtacactatcaatagcatcaatcacgtacgaataaccggcattcatatattgcgctacgttatccggcgtcacgaagtcatccaccaccattacacggcactccgggttaatctggcgaatacgctccgccatgacttccgcttttgccagcccgacgttatcgcgcagagcgtgaatttgccgattggtattggtgacgcacacatcatccatatcgataagcgtgattgcgccaatccccgtgcgcgctagcgcttccgccgcccaggaaccgacaccaccgataccaaccacacaaatatgcgcgtcagcaaacagttgcaatgctttttcaccatacagacgcgctgtgccaccaaaacgctgacgccatgcatcactaattaccacagacatagcacctcagaattaaaaagggtgaggttacccctcaccctgtcatatccgtaaaaacggcatacagaatatcacatcagccgctaaagacgttacctgcgcccggggcggttttcagcacccagacacgtccatagtggttgtaccaaccagcgcggtgtccggcttccggcccgatcccttgatagatatcgaagtgttggcctttgattgcgccaccgacatccagcgccaccatcagacgcaattcgtactgaccgttaaatttgccgttattatccagcagcggcacttctgccagcaaggtagtacctggcggaataattgaacgatcggaggcaacagaagcacggccaaccagcggcaccgcacttgcccctttcaccggtgcaaaagattgcggtttaaagaagacgaaagacgggttctgttccagcagctcgcgaacctcagcttcactgtgtgtttcgccccagtgacgaatcgcctgcatcgacatatcttcttttttcacttcgccacggtcgatcaacaccttaccaatgctgcgataggcatgaccgtttttccctgcatagctgaaaaagttaagcggactgccatcaccaaagtcgatatacccgctaccctgcacatccataatgaagttatccatcagggagttactgtaagcgagaatatatttatcactcagagctcctgcgtagatctccgcacgagacggcagacgaccacgttttggcggcatacggtaaatcggatactggaactcgccctgacgggtatggcgcgcctgaattaccggcgtgtaatagcctgtaaactgcacgttaccatagttgtcgacaccttccatctgccaggcatcaatgccgaactggcgcatattgcgggtatcaccgcctgcgcgcagccactcttgcaccgcgttataaacattactctggttgccatacagacgcggtgacgaattacggatatggttaatttgctcggcaaaatcaccggcattaatcggcgcgccaacggcatctggctggttcaccagagagaaaggctgggtaaatttcccgtctttatattgctgtccgcgatcggttggtttggaagagcaggcggcaagcattgccacaaccgtgcccataagaaggtactttacccaacgtcctttcattgttctcttcttcaggttaaaaaataaggcgcaacgaagataacaaaccaccgcgtttaatgaaatgagcagcctctccctgacgcaaattttgcacaaaaaataggctttagtgatttgtttttgttcaaaatcatgccgaatccgtgatcggggtaaaaaaaaggttgcatgaaaacgcgagcagagtatagtgcgcatccacggacgcggggtggagcagcctggtagctcgtcgggctcataacccgaaggtcgtcggttcaaatccggcccccgcaaccaattaaaatttgatgaagtaaagcagtacggtgacgcggggtggagcagcatggtagctcgtcgggctcataacccgaaggtcgtcggttcaaatccggcccccgcaaccaatcaaaatttgatgaaataaagcagtacggtgacgcggggtggagcagcctggtagctcgtcgggctcataacccgaaggtcgtcggttcaaatccggcccccgcaaccaatttattagaatgctgacaaaccgcaaagctgctattggcttgcggttttttcgtttttacgcttccttacccgtttcagtgaagcctgagacaatgagtaaaccgttaatatccctccatcaaagccatccatcttatttatatattaaacatataccccattaatgaatttcatttatatattctataaatcaatttattttggttatgttaacatttcaatatcacaacagggcgcaacgcttatataatcattgtacaaaaagcacacaactttttaattagtagaaaaattaataattttttgtgaaagcccggacaataagtttaatgaatatcttaataggctctcatactacccaatttcttaaaagtgcaaatttgtgaagcttatcctgttattattttaagtttcatgccaaattctctcaccagataatgccgccctcttccgaaaaataatcaagaggccaaacaatatctaaaatgatacaactgtatctattcccctgaaaaatacattattcatttgtatattttcctcatcattgctttttatttaaatcatccgataatcccctgaatataattatgtcaataaccatcagaaaaagtggatgatgaggaaaaggatatggccgacagtttccagaatgaagttcccgccgctcgtgtaaatatcaagcttgatctgcatacaggcaatgctaaaaagaaagttgaactccccctcaagcttcttgccgtaggcgattacagtaacggaaaagagcaacgtccgctgtccgaacgggacaaggttgatatcaataaaaacaacttcaacagcgtcatggctgagttttcgcctgcggttaatttaacagtagaagatacgctaaacggaaacggtaatgaacaaaatatcgcgcttgaatttaaaagcctgaaggattttgaacccgaacaggtagcaaaaaatattccgcaacttcgtgtattactcgctatgcgcaatttactacgtgacctgaaatccaatctgctggataacgcaacgtttcgccgtgaactggaaaatatcctgaaagacccgacgctcagttcagaactgcgtgatgaactggcgaaaattgcgccgcaggagaacgtttaacccgaacgcgtattcaggttaaaccggagaagaaaggatcactgaaaaggaaatgctgatgtctgtacaacaagaacatgccacctctgaaactgcaacactcaccaccactgagtccggcggcgtttatcagtccctgttcgataaaattaatttaaccccggtgtcttccattcaggaaatcgatttatggcaaaacagcgaaacgctggccgatgcctcacccgatgagcgcgtgacggcggcgattcacgttctgctttcctgtctggcgaaatcaggcgaggacgtggttaagctcgacaagagcctgctggattttcatatcgacgatctggatcagaaaatcagtaaacagcttgatgcggtcatgcaccaccctgaattccagaaagtcgagtcgctgtggcgtggtacatggttcgtcgtacagcgcactgattttcgcaaaaatgtcagaattgaattgctggatatcagcaaagagcatctgcgtcaggattttgatgattcaccggaaatcattcagagtggtttatatcgccatacatacattcaggagtacgatacgccgggtggcgaacctgtagcctcattaatatccagctatgaatttgataacagcccgcaggatattgccctgctgcgtaatatttccagagtgtctgccgcttcccatatgccttttatcggttctgtcggaccgaaattcttccttaaaaattcgatggaagaagtcgccgcgattaaagatatcggcaactactttgaccgcgcagaatatattaaatggaagtcgttccgcgatacggatgacagccgctatgtgggattagtgatgccgcgcgtgctgggccgtctgccctatgggccggacacggtgccggtacgcagctttaactatgtggaagaagtcaaaggcccggatcacgaaaaatacctgtggacaaacgcctcgttcgcctttgccgccaatatggtgaagagctttgtgaataatggctggtgcgtgcagatccgtggcccacaggcgggcggcgcagtggccgatctgccgatccatctttacgatctcggcaccggcaatcaggtcaaaattccgtccgaagtgatgatcccggaaacccgcgagtttgagttcgccaaccttggctttattccactctcttattacaaaaaccgcgattacgcctgctttttctcggcaaactccgcccagaaaccggcgctgtatgataccgctgacgccaccgccaacagccgtatcaacgcccgtttgccctatatcttcctgctgtcccgcattgctcactacctgaaaattattcagcgcgagaatatcggcaccaccaaagaccgccgcgtgctggaactggagcttaacacctggatccgcacgctggtgacggaaatgaccgatccgggcgatgaacttcaggcttcgcatccactgcgcgacgggaaagttatcgtcgaggacatagaggacaatccgggctttttccgcgtcagactctttgccgtgccgcatttccagatcgaagggatggacgtcaacctttctctggtttcccagatgccaaaagcaaaagcctgatcgggcggtggtgtgatgtatgaaaatttgtcgaccactgtgggctgaggggacattcctgtcttctcagcagtttcagcagcaggcccgctgggaagcgttcagcaatgacagcattgcgcagctttgtattcgccatccgtgggggatcgcaaacgtgctctttgaccgggatgccctggcgctcggaaagctgaaaacgcaggcagtacgcctgcgttttgctgatggtacgctgatcgattcagacgtgagtgacgtcctgccgctcgcctgcgatctgcgcgcgctgaagaacgacagcgcgattgtcctgctggcgctgccgcttgcacatggtaacggcggtaatctcggtcagggtgagcagactgaaagaccgctgcgctatcgtcaggaatggcaaaaggtgcaggatatctacggcagtgacagtgaagatatggccgttgagcgtcatgcgctgtccctgcgctttgctcatgataacaatcaggattacatcacctgcccactggcgcgtctggtgcgggatgttcagggcaactggacacaggatgagagctatattccgccgttactggcgtttaacgcccatgacgggctggtacagcgtctggacacgctgctgttgcagctacgggccaaatgtcagcgcctgatggcgatgcgccgggaaagcaaccagcgtatggcggacttcgccgtcgccgatgtctccctgttctggctgcttaacgcgctgaactccgccgagccggtactgagtgatttcctgcgctacccggcggttcatcccgaactggtctggcgggagctggcgaggcttgccggtgcgctgctgacgttttcccttgaacataacgtcagcgccgttccgccctatgtccacgaatcgccgtccatcgtctttccgccacttttctccctgctcagcgaactgctggaagccagcctgccgtcacgggtgatcgcgctggatctggcgtccctgccgggcaaccgctggaaagcagacctgcacgatccgcgcctgcgggaagaggccgacttttacctgtccgttcgttcctctctgcctgcgcatcaggtactgcaccagctaccgctggtctgcaaaatcggtgcgcctgatgacgtcacgctgcttatcaatgtggcgctgaatggtgttccactggtgccgcttacctcagttccggcagcgctgccactgcggctggagaaccagtattttgcgctggatatgcacagtgacgcggctaaatcgatgctggagtccgggtgctgcatgatttatgcgccgggaacaatgggcgacctgaaacctgaactgtttgcggtgctgcgcacatgaaaaaagagacggatatcaatatcgacgcgctgctgcgcgacacgtttctgacggtggtggaactgcgtcagggaaccaccgtgcgtcacggtatggagctgtatcgccactgccagcggcaggtggaactggtccgcgaacgtctgaaagatgccggattcagtcgggagaacgtggagcacataacttacgcgcagtgcgccctgctggacgaaacggtcctgagccgtagcggcatggacgacggtcagaccatctggatgaaggatccactccagtcgcatttcttcaacaccctgcaggccggtgagctgctgtacgagcggatgaagcaggtgctacaggaacccgcccccgcgcaggccgtgctgacctgctttcaccgtgtcctgctgctgggatttcgcgggcgttatcaggatccggcagccccggagcgcgaccagcttatttcgacgctcaacgggcaggtcgcgccatttggtgtgctgccggaaacggcggtactgaacgtgccgttatccacccgtcagcaccctttgctgcattcgccatttttctggctggtaacactggcgctgctactggcgggcgtctggtgggggctacaccactggctgaatgtactggtggatgaactgctgccgcaaagcctgcgttaaagggagtcgtgagtgaggaacacgctgaaacaggccatcgtgctgtggggaatggtgttactgctggtgctgtggtcagtgtttatcagtccgtctggcgtgctgagatgggccggtgcggcggctatcgttctggcggttgccgcgttgttgatttatcggcgcaggcaggcgtggacggagatgaccggcgatgccgggttgtcatcgctgccgccggaaacctaccgacagccggtagtgctggtctgtggcggtctgtcggcgcacctgtccactgacagcccggtccgccaggtttcagaagggctgtatctgcatgttcctgatgaagaacagcttgtggcgcaggtggagcgattgctgacccttcgcccggcgtgggcatcgcagcttgccgtggcgtataccatcatgcccggcatacaccgggatgtggcggttctggccggacggctgcgacggttcgcccacagtatggcgacggtgcgtcgtcgggcaggcgtaaacgtcccctggcttctctggagcgggctgtccggctcgccgttgccggaaagagcgagttcaccgtggtttatctgtaccggcggcgaagttcaggtagcaacatccacagagaccaccatgcccgcgcagtggattgcacaatccggcgtacaggagcgcagtcagcgactctgttacctgctgaaagctgaaagcctgatgcagtggctgaatcttaatgtgctgacggcactgaacggcccggaggcgaaatgtccaccactggcgatgaccgtggggctggtcccctcgttgcctgcggtggataacaacctgtggcagttgtggatcaccgccagaaccggcctgacgccggatatcgcggacaccggcacagacgatgcgctgccattcccggatgccctgttacggcagttgccgcgtcagtcgggctttaccccgctgcgacgagcctgcgtgaccatgctgggcgtcaccaccgtggcgggtatcgccgcgctgtgcctgtcagccacggcaaatcgccagttattacggcaggtcggtgacgatctgcaccggttttatgccgtcccggtggaggaatttatcaccaaagcccgtcacctgtcggtgctgaaagacgatgcgaccatgctcgatgggtattaccgggaaggagaaccactgcgcctcggtctggggttataccccggcgaacgcatccgccagccggtattacgcgccattcgcgactggcgtccgcctgaacaaaaaatggaggtgacggcttcgcttcaggttcagaccgtgcgtcttgacagtatgtcgctgtttgacgtcggacaggcccgcctgaaagacggctcgacaaaagtgctggtggacgcactggtgaacatccgggcaaaaccgggctggctgatcctcgtggccggatataccgatgccaccggcgatgaaaaaagcaatcagcagttatcgctgcggcgtgccgaagcggtgcgcaactggatgctgcagaccagcgacatcccggccacctgttttgccgtacagggactgggcgagagccagcctgcggcgaccaacgacacgccacagggccgggcagtcaaccggcgtgtcgaaatcagtcttgttccgcgttctgacgcctgtcaggacgtgaaataaaacataccgccggaagaaggcggtgcttcaatcacactaacaaggagagtaattctcatggctattcctgcttatctctggctgaaagatgacggcggcgcggatatcaaaggttccgtggacgttcaggggcgcgaaggtagcatcgaagtggtggcgctggatcacgatgtgtacatcccgaccgacaataacaccggcaaactgaccggtacccgtactcacaagccttttacgtttaccaaagaaatcgatgcgtccagcccgtatctctacaaagctgtgaccaccggacagaccctgaaaacggcagaatttaagttttaccgcatcaacgatgccggtcaggaagtggagtacttcaacatcacgcttgataacgtcaagctggtcagagtcgctccgcttatgcacgacatcaaggatccttccagagagaagcataaccacctggaacgtattgagttccgctacgagaaaatcacctggacttacaaagacggcaacatcattcattccgactcgtggaatgagcgtccttccgcctgataactgcggcagacaggaaactgtctgcctttttgttgtgtgctttgtccagtgccgcaggcaccggtactgagcaaagcatacccacaatctggtgatacctgatgggcctgagtgaggtaacggctatgggcggtagcgtgcctgaacgcggatcgcaggaatacagaacacgataaggaaacccttctatgacaggaaatcaccccgccgcgctgctgcgtcgccttaacccatactgtgcacgggcgctggacgctgccgcctcactgtgtcagacccgcgcccatgcggaaataaccattgaacactggctgctgaaactgctggagcagggagaaggcgatatcacggtgattgcccgccgctatgaatgggatatcgacacgctctggcagtctctgctggcacatctggacaccttaccccgcccggtccgcgaacgtcctcaactttctgaaccgctggcagcgcttatccgacaggcgtggctgatagcgtcactggaaggcgacgatccacaaatccgcagccagcatctgctgatggcgctgacagaaaaaccgatgctgcccgcctgtaatgacctgtgggtattgctgagtctgagccgcgtgcagcttgagcggctgcgtcccctgctggatgcgcagtcggatgaatgtccggcacgtcagccacaggtcaccgaaccgctgacctctgcactgccggagacggcaacggcggacgcaccggcaaaaacgctgacggagaaacaggatgacgccctgctggcggtgcttaaccgctttaccgaagacgtgacggaaaaagcccgcagcgggcgaatcgacccggtattcgggcgcgacacggaaattcgccagatggtcgatatcctctcccgtcgccgcaaaaacaacccgattctggtgggagaaccgggggtgggcaaaaccgcgctggtggaagggctggcgctgcgtatcaccgaaggcaacgtgccggacagcctgaaaacggtgcatatccgcacactggacctcggtctgttacaggctggcgcgggcgttaaaggtgaatttgaacagcggctgaaaaatgtcatcgatgcagtgcagaaatcaccggagccggtactgctgtttattgatgaagcccataccattatcggtgcgggtaatcaggcaggcggcgcggatgcggcgaacctgctgaaaccggcactggcaaggggcgaactgcgcaccatcgcggcgaccacgtggagcgaatacaaacagtattttgagcgcgacgccgcgctggagcgccgcttccagatggttaaggttgacgagccggatgatgacaccgcctgcctgatgctcagggggctgaaagcccgctatgcgcagcaccacggcgtacatatgctggacagcgccattcagaccgccgtgcgcctgtcgcgccgctatctgaccggacgccagttgccggacaaggcggttgatttgctggataccgccggggcaagagtccgcatgagccttgacaccctgccggaaccgttgacgcagcttcatgtgcgactggcggcactggatattgagcgggaagcgattgagcaggacagcgtattttatcccgaagccagcccggagcggctggcggaactgaccgatttgcgtgatgagctacaggcagaagccgggcatctggaagcgcagtatcagcaggaaaaggcactggcgcagcagattatgacgttgcgtcaggaagggacagacagcactgaactgcaacagcaactgcgaacgcatcagggctttgcaccgctgctggcgctggatgtggacgcccgcgccgtcgccacggtggtggcggactggaccggcatcccgctatcttccctgctcaaggacgagcagagcgacctgctcagtatggaacagagtcttgaaaaccgcgttgtcgggcaaagcccggcgctctgcgccatcgcacagcggctgcgggcggctaagaccggcctcacgccggagaacggcccgcagggggtattcctgctgaccggccccagcggcaccggtaaaaccgaaactgcgctcacactggccgacactctgtttggcggtgaaaaatcccttatcaccatcaacctctccgaatatcaggagccgcataccgtctcccagcttaaggggtctcctccgggctacgttggctacggtcagggtggcgtactcaccgaagccgttcgcaaacgcccttacagcgtggtgctgctcgacgaagtggaaaaggcgcaccgcgacgtaatgaacctgttctatcaggtatttgaccggggctttatgcgcgacggcgaaggccgggaaattgacttccgcaacaccgtgattctgatgacggctaatctgggcagcgaccacatcatgcaactgctggaggaaaaaccggacgccacggacgcagacctgcatgaactgctgtatcccctgctgcgcgagcacttccagccagcactgatggcgcgttttcagacggtgatttaccgcccgctgggacaggaggcgatgcgcgccattgtggaaatgaaactggcgcaggtggcccgccgtcttcaccagcactatgggctggaaacggaaatcagtaacagcctgtacgacgccctgaccgccgcctgcctgctgccggacaccggtgcgcgtaatatcgacagcctgctgaaccagcaaatcctgccggtcttaagccagcagttgctggcgcagcaggccgtgcatcataagcctgcccgactgcggcttgactgggatgatgaagacgggattgtgctggaatttgatgagaaataatggaggctcttatgaacgtacagttcttcgaccacgcacaccacaagctcaaaattcgcggcctgcaaagtccggtggatgtgctgacctttgaaggccgcgagcaactgagtaccccgttccgctacgacattcagtttaccagcagcgataaagccatcgcgccggagtcggtgctgatgcaggatggcgcattcagcctgacggcaccgccggtacagggaatgccggtacagactgccctgcgcaccctgcacggcgtcattaccggctttaaacatctctcatcgtcacaggacgaagcccgttacgaagtgcgccttgaaccccgtatggcgctgcttacccgcagccgccagaacgccatctaccagaaccagacggtgccgcaaatcgtcgaaaaaatcctgcgcgagcggcaccagatgcgcggtcaggacttcgtgtttaacctcaaaagcgaatacccggcccgcgaacaggtgatgcagtacggtgaggacgacctgacgtttgtttcacgcctgctgtcagaggtgggtatctggttccgctttgccaccgacgcccggttgaaaatcgaagttatcgaattttacgacgaccagagcggctacgagcgcgggctgacgctgccgcttcgccatccttctgggctgtttgatggtgaaacggaagccgtatgggggctgaacaccgcgtacagcgtggtggaaaaaagtgtctccacgcgggactacaactaccgtgaagccacggcggaaatgaccacaggccagcatgacgccaccgggggcgataacaccacttacggcgaagcctaccactatgccgacaacttcctgcaacaaggcgataaagaggcagcggaaagcggcgcgttttatgcccgtatccgtcacgaacgctacctgaatgaacaggccattctcaaaggccagagcaccagttcactgctgatgccggggctggagataaaagttcagggcgacgacgcgcctgcggtgttccgcaagggcgtgctgattaccggcgtgacgaccagcgcggcgcgtgaccgcagctatgagctgacgttcacggcgataccgtactcagaacgctacggctaccgtccggcgctaatcccccgcccggtcatggccggaacgctcccggcgcgggtcaccagcacggtgaagaacgatatctatgcccatatcgacaaggacgggcgctaccgagtcaaccttgactttgaccgcgatacgtggaaaccgggttatgaaagcctgtgggtacgccagtcgcgcccgtatgcgggagacacctacggcctgcacctgccgctgctggcgggaacggaggtcagcatcgcctttgaggaaggcaacccggacaggccgtatatcgccggggtaaaacacgactcggcgcacaccgaccatgtgaccattcagaactacaagcgcaacgtgctgcgtaccccggccaacaacaaaatccggctggatgacgagcgcgggaaggagcatatcaaggtcagtaccgaatatggcggcaagagccagctaaacctcggccatcttgttgatgccgggaaagaacagcgtggcgaaggctttgaactgcgtaccgatctgtggggcgcggtgcgggcgaagaaagggatttttatcagcgctgatgcgcaggataaggcgcagggtcaggtgctggagatgcagccagctctggctcgcctttctgcagcgttggtgacaatggaatctctggctgccagtgcgcaacaggctcaggcactggcggcagatgtgagtcgtcagcagacgctgttgcagcaaaaaattgagcagttacagcaggaagtgctactgggtagcgcacctaagggcgtggcgcttgtcagcggtgaggatatgcagttgtctgccagcgataatctgactctgacagcaggtaagcaactggatattggcgtacagaaagactttacgctggcagcaggaaaacagctcagcttgtatagccgtgcgggagcaaagctctttagctcacataacgatattgatattcaggcgcaggggggaaatctgaccacctggtcaacacaggacacctatatatcgagtggtaaaaagctggtggtgacagcgcaggatgagttaacactgatttgtggcgggggctatatcaaaattaaaagtggcaatgtggagattggcggtccgggaaaactattggttaaaaatgccggtattaagaaagcaggctccggtagtatgcagggcgtgatgaagtcgtttgagcctgaaagtttcgatgaaaatttcattatttcgaatccagcatcaggtaagccgatagcaaatcaaaaatatgaaatacacatgccagatgggagtgttattgccgggataaccgatgcaatggggtattcctctcttgttgcgtcaaaagcatctgatgacctaaaaattattctgaaaaaatgatttcagggggaaatatgttgaaagaatggatgatatttacgtgcagtttattgactctggctggggcgtcactgcccctcagtggctgtatttccagaggccaggagtctatatccgaaggggcggcatttggggcagggatcctgcgcgaaccgggagcaacaaaaaaagccgacacgaaagacctcaatgtgccaccaccggtttatggtccgccgcaggtgatatttcgcattgatgacaaccgctatttcacgctagaaaattatacccactgcgagaacgggcagacgttttataataataaagcaaaaaacattcatgttaaaatattagacgcttcagggtatttatttaaaggccgcttattctggttatcaacgcgtgatgattttctggcctttcctgccacgttaaataccagacacgcttcctgtatggggtcgaataaaggctgtatgaatgcggtcattgtcactaccgatggtggaaaaagacgcagtggtgtgccatacggcagttatacccagaatccgaccggtgccacgagggattatgacatgctggtgatgaatgacggcttctacctgcttagatatcgggggggacagggcagatttagtccggtgatacttagatggattctcagtactgaagatagctctggtgttgtgcgttcagaagatgcttatgaattgttccgtcccggagaagaggtaccctccaccggtttttataaaatcgacctgtcacgtttttatcccaaaaacaacgttatggaaatgcagtgtgacaggacgctggagccagttcaaccttcagagagtaaaattcaatgagtaccaataaatcagagccaacccgaaaggtcgatgttcatcttacggataatggtactccttttgcctattcaatgacctctcataaaaatgtcaaagtccgtgcggaagttcaaccaccgctccagttacccggcttaattatttttgttcacggcgttaattctgaaggcgaatggtacgattatgctgagaggtcgttatgcgccggactcaatcagcgcctggggcttgaaggtgagcatggtcttaaggaaaacaactatgaaggaggtttctttgtcaacagcgataaaagtgagggtggttgggaacatacctacgaaatagagggttcccaaaagaaatgggtttcaggccccagaaaaataacaaaaggtggtgacggtcgttccccggttattcgtttttactggggctatcgtgcggcggataatgaaaccgatacatacgccattccgctaaaaaataaaaagggggacaactattatgaccttcccccggaatcgcgtaaagccaaaggcccttggttttggggcggcggtccgttccagaatggctgcaaccaactggtcagcctgtggagtaaaaccgggtttaataacaatccatccctgctgggggttccgcttccgttcagtactcaggtactgaacggcgaacgtgacaggctactaagcgacgccccaccaagacactattacgctcatgcggctggtcgtctggccaaattaattaaaaccattcgcaaccagcatccggaagacaccgttacggtgctgtcacacagtcaaggaacaatgattgcgctggcggcggcagccatcgaagcgccggatgcgctgtttgtgatgaactccccctatgcgctggagaatgaacctaccacctatatttcctacccgataaaggaaattatcagccgtaaggccagatcggcgacgtttgccgatattgtcaaaaaggtagcggaaaacaaaacgcggctgaagcaacagggctgcgacaatctgctggcaggcatgagcagcgacggtaattcatggatcccggaaggtaaaacacataacggactaccggagcgggacaaccatggaacgacgtggatttattgtaatccccatgaccgagttatggggtcttcccccctgcgcagtattggctggcaggggctgccggatactaaagatggcacaccacataccttatttaaacaggctggagatacgctttatgttcgtatacttgggcgcaatacaccctgcggcggtacgccgaccgcacagacccatttcagtaatttgggtgatggcaaacccttctgggacagcacaacaacgctgttacagagggcaacgtggccggatccggacagcgggcagacattaactattaacgcgccgcaggtgccggaaccgctgacagctgaagaactaaagaattttgatcaagactatgcccgtgacgaaaagcaaagcggcggagcaggatatgcttacgggcagattaacccagagacgaaaaaacctgtcgataccgactatcgttattacatttcactgtatggctattttgaccggaagatggtgccgaaaaaagactcgggatactaccagtcagggccggggtcgaaagaggacagggtaaagtatgaaaagcagtcacaagaagagatgctggaggaggtaagaacctatgttcagcgtccaacagatcacagtaccctgccatcggatgagcgatttatgagccgggtggtggcctatgatttacccatcggttactgctggcattcgtgggacaaagcgggtctggaagagcttcgtcgtcaggctgactggctggaaagcgatgactattactttagtggcaagctgactgttccgccaataccgcctgcgataaaacaggatgtcgccgaagatgctgaacagagaaaggcagaagaaaaggcccggttacgtaatgtgtgaaacaaatacatggaaagtgatatgggaaaaaatgtggtagtactcaatgacgcaacttctcacggtggcaaagtctcttcggcctcttcaacctttgatattcagggaaaaaaggctgcactgctgaatgataccgtcacttgcccgaagcatggtactaacccaattgtggagtgtgataccagttatgaggagggtggacgtgggattgttgtgcatggctgtaaaagcgcctgcggctcggtggtgtatgccagtctgccggatgtggagataggctgatggggtggtcaaaaccgaaaattcccaccagcaaagacgtgcagcgctggtctccttgggtatgcctttttattctgtttgccggggcatttgtcgcgctcacatatgggatactgcattcccctgcggacggactccccgccctcgccagcggttactggttgcccttgacaggcaggatgatggctggagtgatgacagccctaaccggctatttgttgtggtgggagtttcaggcatattacgtctggtgctggaatagtcggcggcacagcgcactccttgtctggcagcagcgagcacatcagcaccgctacttagcctgccatgttctgctgacctcagacacgcaactgcttcctcgcctcgcaggtacttcttatgaagataataataatgatcctcctttaacattattggcagaggagccgctgatacccggtattgcgcgttttgagcaactttgccagttactgataaaccagattaaagcttctcttattcagcattatccttccggtcagatgactgtactgattgaaacctctgcatcggataaagagcgtgagcgaacaacccttattcgtttatggaaagaggatgaattaccctggatactggacatccatatgtcacccactccccttcctctcagtgatgagaataaccacttatttgatattgataaccctgttcttgttttggcgttgcactaccgccagccggaggaaaacctgccggaattcgccagcgcattgttactgttgccgcccgagttactgaaagtttctatacggcgggatacggtgcgggtgtttcgcccgatgccactaaacattgatgcgatctcccgtgagttgactgaactgcgggatatggcgcaacagccagtgaatgccagatatctggtctggcacagtggtctgacacaggcatcacaacaggctctgggccgtgtggtgaacgaccttccgttatccctgcataacgatatcgccactggcggaattattgatgtggataaagttatcgccgcttacgggcctcctgccggttggctgatggtggcaaccgccgcagagatggtcagatacgggccgggaagtcactggttgttacaggtcagaaataaacaggccagtgctgtggtgacgggcaacggctatccggcgattaatcaggaataccttgatacaacctcatctccttatcccgcaggttccctaatgctggcggttatgctcaatatactggtgctctggtttatcgggcggtacagccaggaatggctgttttcctgggcaggcgtagccatgacactgttgctgatgatagtgacattgccaggcatcgtctttggtttacgaagcgctgttgctcatctgcaataccctcgctttatacaggctatcgttcgcgcccagaaggaataatttgttatgaaaagagttgtgcgtcttttgggtgtggggttactgctccttgttgtgttgttgctcattttgtttgttctggctcagaccacaccgctgatatcagcacaggatgagcatgctgtctggcttcgtctgttgataacagcgattgtgatctgtttgctaagtatgtgcatatttttcctcttttctttccggcagaacgaagcctcgacgatatcactatacgctcaaccgactgatataaaggaaataaatacggagcagccgaactatgcatcactgctgacgatatatttacgcgaccgctacggtccgttctggcggcgtaaagtccgcctgctgctggtgaccggcgagcctgaacaggcagaagccatcgcgccggggctgaccgggcaacactggctggaaggcgaccacacggtgctgatatatggcggcaggccaacagcggagcctgatgtcacactgctgaccgccttaaaaaaactgcgccgcagccgtccgctggacggcatcatctgggcgctgacagaagaacagagccgccagacagcgcaactcgacaaaggctggcgcggactgataaacggcggtaagcgactcggttttcaggctccactctatttgtggcaggtctgtgacgacggtgattatcagaccggacgccccctgcaaagcgtcggctgcctgctgccggaacgctgtaccccggaacaactggctgtaatgctggaagcacaaaccctgccgctgacggaacagggcatgtcgcagctactgaccgataaccgccatgattttctgctgcgtctggctcatacccttgcagagcggggtattgctcactggcagaccgtcctgaaaccgctgctggcaggcggcgcattttcttccctgcgcctgcgcggcctgatgttcagcccgccgcttgccgccgtgccggaggccgcacctcatgcgtggctgccgtcaccggtctgggcgggcgtgacgggtgataacgcgcgcgggcgcacggtgggttttccgtggctgcgtaccgcactgatgtccgctgtctgcgtgctggtgatatggggggccggaatgacgacctcgttcttcgccaaccgcgctcttgttcaggaaaccggtatccagacggcacgtgcgcttgatacccgcctgccgctggcagaacaactggtggcgctgcataccctgcagggcgaactggaacgcctgcaatatcgtatccgcgaaggtgcgccgtggtatcagcgttttggccttgaacgtaaccaacaactgctcgccgccgcttttcccggctatgcgcaggcggcaaaccggctggtgcgcgacgtggccgttgaccatctgcaacagcaactgaacgcctttgtcgccctgccgcccaacagtcctcagcgtaccgccaccggtgaacaacgctataagcagcttaaggcattgctgatgacttcccgcccggaaaaggccgacgctgcctttttcagtaccacgctgatggcggacggtctgcgctacgagaatatcccggaaggtgtgcggcagagcgtgttgccgtcactgctgaccttctggacggcgaacctgccggaacacccgcagtggaaaacatcgccgccaccggaactgaccggcgcagtgcgtaaaatcctgctgcgccagattggtgtgcgtaatgccgaaaacaccctctaccagaacgtgctgcaacaggtgtcccgcaactacgccgatatgacgctggcggacatgaccggggataccctcaccgaatctcttttcagtacggaacagacggtgccggggatgttcacccgtcaggcgtgggaaggacaggtcagggaagccatcgagcaggtggtgacggcgcggcgcgaggaaatcgactgggtactcagcgaccgccagcaggatacctctgcggatatctcgccggatacgctgcgtaaccgtctcacctcacgctactttaccgactttgccggaagctggctggcgtttctcaacagcattcactggaaaaaggaagactcgctctccggcattctcgaccagctgacactgatggccgatgcccgtcagtcgccactgattgcgctgacggacaccctcgcgtggcaggcggcgacaggcagggaaaaccgtggtctgtcagactcgctggcgaaatcggcacaggaactgtttaacggcaaggagaaaacgccgcagcaatcccgtgaaggtgacgacgtgcctgtcgggccgctggataaaaccttcacgccgctgctgcgtttgctgggcgataaggccggaggcggcgacagccagctgagtctacagacctacctcacccgcgtcacccgcgtgcgcctcaaactgcaacaggtgaccaacgcccccgacccgcaggagatgacccaacaactggcgcagacggtcttacagggtaaaaccgttgacctcaccgacacccgcgactacggacggttaatcgccgccagtctgggcgaagaatggagtggcttcggtcaggcgctgttcgttcgcccggtagagcagtcgtggcggcaggtgctgacgcctgcggcggacagcctgaaccgccagtggcagcgggcgattgtcagccactggaatcaggacttcgctggccgctatccgttcaaagcctcacagaacgatgcctccctccccctgctggcgcagtacctgcgcgatgacgggcgcatcaacctgtttatcgccgccaacctttccggcgtgctgaaacgagagggccgctactgggtggctgacgccatgaacacgcaggggctgacggtcaatccggactttatccgcgccctgaaccgcctgcgcgacgtggccgataccgcctttgccagcggcgatgccgggatacattttgaactgcgggcaaaaccggcgcgtgacgtgatgaagacgcatctggtgattgacgggcaggagctggaatatttcaaccagaaagaacgctggcagcgttttaactggccggatgaacagtggcaacccggcgcatcgctaagctggaccagcacacaggcgatggagcgcatactggcggattaccggggaagctggagtcttattcgcctgctggaacaggcgcaggtgacgccggtggacagcagcacctttaaggtggtgtggaaagcgcaggacggcctgccgctgaattacctgctacgggttgaacagggtaaagggccgctggcgctgctggagctgaaaaacttccgcctgccgggacaggtgtttctgaccggaaaaagtatgaaggatgtggaagagtatggggaagacgccgatgagtgaactgttgcaaaagctgacccgtagctgttttgccgaccgggatgcactggatgtggcgcgaacacaggcggcgctgtggcagacatggctgctgccggtgacggcagatacgccggtcggggaagaccccggctaccacgacgattttctgcgtatccgcgacgagatgaacaaactttccggcgcggatacggacctcatctgccagcttgccgaatccctgctgctgacgcaggcaaaagacgtgcgcatcgccacttactacatctgggcgcgactgcaccgcgacggtgagcgcggactggcggaaggactggcgctgctgaccggactggtggaacgcttcggtacgcaactgctgccctcgcgcccggccagccggaaaatggcgctggagtggctggcgggggaaaagatgctcgacagccttgcccgctacccggaagtggcaaaagaggattttgcgaacattgttgccgccctgaatctgctgacggtttccttcgccgcgtggcccgaagaccagcattccccctccctgatgccgctgattaacgcgctggaatcgcgtctggcacagtcgggcggaatgaacgcggtggtgccgcagaacagcagcggcgttccggcaccgtcatccccggtggatgcgccgcaggtacagaccatcacctccggacgtgacctgctcgaccaggcgaaagtgctggcccgttatctgaacgaacagccgcagggctggctttcggcgcaccggctgatgaaaaccctgcgctgggatacggtgcatgaactgccgccggacgtggacggcaaaacccggctggccccgccgcgcaccgagtcacgcaaccagcttaagcggctgtatgcccagcagaactggacggaactgctggagcaggccgacctgatgttcagcaccggcgtcagtcatttctggctggacattcagtggtatctgcatcaggcgctgactaaggcgggcgtaccgtgggacaggtggacagccgttatccgtcaggacctggcgttactgctggaacgcctgccagggctggaaaatctggcatggaacgacggcacaccgttcgccgacgaggtgacgcgcaactggatagcgcagcaggtcatgatgcgggaagacggcgcatggcttgcggggaaagccgctgtaccgacagacgacgccacaaatgacgtactggcgctggagccggaagcactggcgatggcagacagtcagggcgtggaagcggcgctgggctggatacagacccgtccgggcatcaccacggcacgacagcgcctgttattgcggctgctgatggcacgggtggcggaacagtacggtaaaaacgagatggcgctcctgctgctggaagaactggataccgccgcacagggaataacgctgacgcagtgggagccagaactgctgtttgaagtaaaagcccggcaactgaaactgctgcgcctgcgggcacatcgccacgcggacaaggcggcgcttgcccggaaaatggacgctctgctgggttcgctggtggcaatcgatccggcgcggacagcggtactgtgtgatacgcagcataaggactgatttcttatttgtatttcagattaaaggactttgatggacgacctgacccaacgctactatgaagccgaaatgcgctacctgcgtgaagcgggtaaagaatttgcgcaggcttaccccgaccgtgctgcgatgcttaatcttgataaacccggcgcacgcgatccctatgtggagcgcctgttcgagggcttcgcttttttaatgggccgcctgcgcgaaaagctggacgacgatctgccggaactgactgaagggctggtcagcctgctgtggccccactacctgcgaaccatcccgtcactttccgtggttgaactgtcgacagatcaccggcagatgaagcagagcgaaacgctgaaagagtttcaggtgctatcccgtcccatcggcgaacgcagaacccgctgcgtctacagtgccacgcgtgatatcacgctgcatccgctggcgttgccggacgtgtcattgcaatatgaaccggacggacgctcggttatccgtctgcgctttgcgtgcggcccgctggttggtgactggtcgcagatcgatttatcccgcctgccgctctatctcaatgccgacagcccggtagcctgtgcgttgcaccgggctttaacgcttggcacgcagcagttctggctgcgtctgccggggcaggaacgccgtgtgctggacgcgcacttttccccgatgggttttgatgacgatgaccgactgtggccgaaaggtgagtcagcgttcagcggctaccagttgttgctggaatatttcaccttccgtgagaagtttatgtttgtggcgctgaacgggctggagaacgtcatctggccggaaaggataaccggctttgagattgacgtggtgctggcggaaaactggcctcatgatttgccgtttaataccgacaatctccgcctgcactgcgtgccggtcatcaacctgttcccgctcgaagccgatccgttacacctttcgccgctggaaaacgaatttctgctgcgcccgatgcgcattcaggacgggcataccgagatttattccgtcgacaacattatttcttcgcgccataccggcagtcaggcgtatgtccccttctccagctttcgtcaccggggcgggatgctgcgccacgatgcgccggaacgctattaccacacgcgggtaaagcgcggcccttccggcctgcatgacacctggctgattctgggcggcgatgcatttgatactgaccggatgctggaggatgaaacgctctctttaagcctgaccggtactaacgggcagcttccccgtaaggctttacagagcacgctgctcgatacgccagttcatgcctcacagaacgtcctgcgggtgcgcaacctgtgcgctccgacgcagccctgctatccccctgcgcgtgaccgcttccactggcgggtgctcagtcaccttggttctaactttttatcgatgatggataacgccgaaattctgcgcggcacgctggcactgtacgactggaccgaaagcgagatgaaccgccgtcgtctggaggcgattgtcgacgttcagcacagcctgatacagcgttttgaaagaggctttctgctgcgtggcgtggatattcaggtgacgctggacagtaacggctttgccggagaaggtgatatcacgctgtttggtgaactgctgcaccgctttttcgcactgtatgccgatatccacttattcactcaactgaccttaattctgcaacccacaggaaagtgcctgcaatggacagagcatcacagccagcgcgtaccgggctgaccgaccggctggccccggatattgcgcggatcaatttttaccgtttttgccagttgctggaacagagccagcagaacgcgccgctgggcagtaccgacagccccgccaccgatgcggtgcgctttcgtcctcatcccggtatgggctttccggtcagcgagttaaaaaacgttgaacgtgacgcgggcaatcccgacgcgccccccacggtgcgcaccacctttctcggcctgtacggcgtggattcgccgctgcccaccgcctatctggactacattacccagcgtcatgacggacatgacgcagtgatggcgtttctcgatatttttaaccatcgctttattactcagtactaccgcatctggcgcaaatataactacccggcgtcgtttgaagcaggtgccgtggatgacatttcccgttgtctgctgggactcatcgggctgggtattcccggcagcgagaaccatatcgccacgccggtatcccgttttctggccctgctcagcgtgatgcgcctgccgacgcgcacggcggaaggcgtcacggcactggtagggctgcttgccccgctgaccaaagcgacggtggtgcctcacgatccgcagcctgtaattctcccggcccctgcgggtctgtcaaaaaattcacgcatcagcctgaaaacgcgaacgctgctggggcgtaccggtaccgacgccaacagccagttgctgctgaaactgtataccgaagatgccgcagaagcacgtggctggctgcccgacgggcaactgcacagcgatttgctggtgctgctgcgcgtttatctgggctggcgctgtcaggcccgtctgcaactgacgctgcccgtcagcctgttgcctgctgcccggctgggaaaacagcgtgtacagattagccgtaccggcatccttcgcgcctcctttgccgcgcccgcgaccggaacagtgacggtcagtctggggcgttatcagggattaatacccgctttttccattcgtaacagggagagtatgactcatgtttcctattcgttttaaacgtccggcgttgctctgtatggcgatgctgacggttgttctgagtggctgcggcctgattcagaaagtggtggatgaatcgaaaagcgtggcctcagccgttttctacaaacaaatcaaaatactgcatctcgatttcttctcccgcagcgccctgaatacggatgcggaagatacgccgctttccacgatggtgcatgtctggcaactgaaaacccgcgaagattttgacaaggcggattacgacaccctgtttatgcaggaagagaagacgctggagaaggacgtactggcaaaacacaccgtctgggtaaaaccggaaggcacggcatccctgaatgtgccgctggataaagagacgcagtttgtcgccattattgggcagttttatcaccctgatgaaaaaagcgacagctggcgtctggtgatcaaaagggacgaactggaggccgacaagccgcgctcgattgaactgatgagaagcgacctgcgactgctgcctctcaaggataaataaccgatgtcgacaccttccttatatgaaatgctgacgttcagtttcagcggcgagttaccgctggaacagatcagcgagcgggatcagcttatcctttccgtgatggacaatatgcaacgcattatcaactgccgggcaggcacgctggcgcatttgccggattacggtctgccggatctcagtctgatccatcaggggatggctgcgggtattcatggcctgatgcgtcagattgaagaaacactgctgcgttatgaaccacgcctgagtcagatacaggtggaattactcccccagccccgtccggggcatcttaattacctgatccacgcgcagcttcccgataccggctggatacgctttgatggcgtattttctccggaaggacgaattgttctgcgtcatctcaaacaacaggagcgggcgtactgatggcaagtaacgcgaattttatcagccagttcgtcatgggcggcgatccctgtacttataaggaatccggtgaactgcaggctgaaatgagtaaactgactcacccggcccgaccggatgtggactggcgtcaggtggaaaaactctgcctcgcgctgttccggcaaaatggcgtggaactacagacgctggtctgttacgtactggcgataaccagacggcaggggctggcagggatggcagacggactcggttcactggatatactgctccagcgctgggctgacttctggccggtacaggtacattccagaatatcactgctcagctgggtcacagaaaaaatgcagcaggcactgagaacgctggatattcagtatcaggatctgccgcagatctaccgttgtgtacagcatctttccgccatcgaaaccacgctgcaacagtgtgaactgtggcatatgacgaaactggatctactggccgggcagtttcgcaataccgcattgcgtctggaacggctggcgcctcagggagcggaaaccactatcactccccctgaattaccccgccgggaaatgaatcaaccgaaaaagtcagaggaaagtccacagccggtttttgcaaccagatccgttcagcaaaacgataaggatgccagtccacccgttccatcccctgaaatctcccggcagcggacatggccgatatttatggccggaatggttgtgatggccggtctcggcggaacaggattatggggctggtcgcagcttaatcagccggacgcgctaatccagcgaatacaactgtctgtcatgccgttgccgctgtcgctggagagcggcgaactggcaaagctggatgtaaaggataaggcgctgctggctcaggacagaacaattgcggcaagtcagatgcaactggagcagttaaacaaattgcctgcccgctggccactggagcagggatatcgccagctacgccagcttgatgccctgtggccggataatcctcaggtcagggcgctgaacgcgcagtggcgcaaacagcgggagctgagcgccctgtctgctgaggcactgaatggctatgctcaggcgcagagccagctacagcgcctgtcggcgcagctggatgcactggatgaacgtaaggggagatatctgaccggttcggaactaaaaacggcggtgtacggcatccggcagtcgttaaaggagccgccgctggaagaactgcttcggcaactggaagagcaaaaacagaccggagaggtttcgccaacgctgttgacgcaaattgatacccggttaaatcagttgttgaatcgctatgtcattttactggatacgaaggtggaacaaagtcagtaaacatcgggggatttatgtaccaataagggatatgtgaccttgccattttttaaaggagtctctgtgtacaaaaaaagagaggaacaggccattcgatctactcgttgattcacatcagataatgagtgtatatttcggtagatagcttgggttcgggaacagtgaataccttaagtttcaaaagattggattaacctcttgactgtggcccccgcaaccaatttattagaatgctgacaaaccgcaatgtgttctacaaattgcggtttttttgtatttaaaatctttgttcgctgaactcacaacacgttttttatctcccttcctgcgaagtaatcaattatcgactgggcaacgtgtatcccggtttgctggtatgactcaacggtggcggccgcgatatgcggcgttgtaatgatatttttggcatgtagcagtgggctaaattgcgccaacggttcagagctaaacacatccagcgccgcaaacacatttcgttcttcaatcacctgaagtaaagcgccctcatccagcaactttccccttgcgacattgatgagcagagcaccattgcgcatcatcgacaaatatttatgactaatgaagttctccagcccagaagaaaaaggcaaaagaacaatgatgacatgcgactgcataaagatatcttcaattgatacaaactgaactccagctttgtcagcaacctgatagtcgggttgtttgtcaaaagctaaaagctcaacatcaaaaccggataaccttttcgccagagttttacctatattaccgtagccaaccaggccaatccgtttcccttgtaattcacagccatgcgactcaccccagtagccattttgcatcgcatgatagctgccagggatatttctcatgctcgcgaagataagtccaatgataaattccgcaaccgcatttgaattaatcccaaccgcattattgacaacaataccggattgctgtgccgcacgaagatcaatattgtctatccccgtcccgaatctcgatattattctcacaccaggcagcaatgatagcgtgtccgcctgataaccatcttttccggcgatgaccgcgcaaatagattctcgtaatgcagtggattctgatttaagcagatgctccatattattcttaataataagattaaaattattctctcttagcaacttgctggcggaaacacagcgtgctgaaaagctggggacggtgaccagaacatttttcatagcggacactcacttcaaagaacgccaccccaaaagatggcgtgaccggttactgtatttatattttgaaattatgaatttgctttaatgccgagtgcacctcctggatgatataagccgaaatcagcacgagtaaattttttcaattcagagagtgcaagcgccaccgcatcaccaacaaccagaacaacagtcgacgagcatgacggtgctaaacctaaattatccgcctcacttttgacggggatttcaacagataaatcacaacttatcgcaagcgatgagtgatgactgcgggtaaaagagatcaaataattacccatttttttcaaactaggcagtgtcgccaggatttccgccgtctcaccactgtttgaaataagaataacaacatcgtctttcgccaccattccaaggtcgccgtgtaccgcttccgtaccgtgaacaaaaaacgagggagttccggtactggcaaaagttgctgcgagttttctggcaataataccggacttaccaacaccaataaaaacaacttttccctgacaagattgtaatactttaattaaattagcgaattcagaaagtggggaatcaataacctcttctactgctttaagttcgttatgcataaaatgtttaatgagatggataagatccgtgttattcatttttattctccctgattaatatttttaattacactcacaagacgcgtaagccccatatataatttttctcgaccgcaggccaggttcagacgaaggtagccctccccctccgttccatagacatgccccgccataatgcccactttgccttcatgaattaatcgactgtagaattcatcaaaaggataaccaatagcagaacaatctatccaggaaaaatagcaaccatcagctggccttacgatcaattctggaatattttcattcagatactgctgggtgaattgaatgttagaggcaatatgtgcctttaatgactttaaccatccctcacattcgttataggcaataatagttgcaattatattcagtactgatggggagtttacaaaatcgcgatacctcgatatcgttctgaacttatgattaaaattatcgtcagttgaaatcatatacgatcctgttagtgcaggaacattaaatgttttcgatatcgagttaaatactactactttttctttttttattttaagcgcggatgtaaagctacgattaaaaacaaaatcactatggatttcatctgaacataaccagacattatgccttgtacagcttgcagcgattttatgcagttcttcttccgaccagactgttcctgtcgggttatgaggattacataataacaccatctttgcgcttttaatcttaagatcaaaatcttgccagttgatagcgtagcccccctcattttttataatcaaagaggctgtcagaatatttcgctcgctatgtttaattacatcaaaaaatgcattatagacaggtgtaaaaacgagaatattatcaccatgcgatgtcaataactctattgcttttgcaatagagtacatcacactggggctataggttatccattcaggtttaatatctgtttgatattgttgataataccagtttactatcgcattcagatattcaccatgttgccaacgactgtaccctaaaatcgggtgttccaggcgtttttttaatgctctggtgatagcgtctggtatcggaagatccatatctgaaatagagaatggtagtacatcttttacaccaaatctgtcctcgcaaaagtcccattgggtacaatatgttcctttgcgggaaacaggagtattaaaaacatccatcagtatatccccatatagttatccatatcccgacgcagggcgatgactttagtgccgataatgacttgtagggtattttgatcaagtttaacaaccgcaattccgccggctctttttattgcagcctcgtcaagcaatcccatatctgcgattgttaaacgtaaacgagttacgcaattatccagtgacttaatattctctttaccaccaagtgccttaaccatctgctccgccgcttgcagctctgatttatcaggagttgggatatccgctatagccgtatcctcatgagcgttcagcgtgacaggactggactcttcacggcctaccgtcatcaggttaaatttgagaatagtccaacggaacacaaagtaataaatgaagaaataggccacttcgacacacaccgcgatcggccaacctgttcttgtgccacgcaatacgccaaagctaataaattgaatcagatcgccagtaaatcccatcttcacgcccatatatggcagaaccatgttagcgaatccattcataaaggcatggaagacaaacagcagtggactgacaaataagaacagaaactcaatcggttcgctgacgccgccaataatcaccgtaagcaccccggaaataagcaatgctttgatagcctttctgttttgagcatgagcagtgcgatacatcgccagcgcggcaccagccagaccatactgaatcatcagtttgccctgctccattttccccgccaaatccagcggaatgaccgcattctctttgacgtatgccataaacatgttcagggtgccgtaatattcttcgccaccaatcacagccgaaccgccgattggcgtaaagcggaaaactgacgtcaccagatggtttaagccaaaaggaatcgtcacgcgttcggcaactgcatagaagaaataaccaacaggaccggaagttgaaatccagtgtccaatgagcatgaaaagattgaaaaacggcggccagataaaaggaatgatcagaccaaatccactcatcacaatcagtgtaatgataggcaccagacgtgggccgctataaaaacctaacgattcaggaatgcgtaaattaacgatctttttatacatgctggcgactaataacccagcaacaattccccccaacacgctggtattgtaggactggatccccagaatgatggtttgcccatgtgtcgacatttggtcagcaacgaccaataagtcgtgctgtttaagataaaagttcgttcccagatgcatcgccataaaaccaattaagccagaaaaagcaccataggctttatcctctttatcttttaataatcctaagggaatcgctatcgcaaacaatacaggtaaattaacaaaggcaaacaaaccaagactaacaatgaaatcaagtatggttttaattattggaatagccagaaatggaattaactttgccatatcatcactggctaaaccacttcccagccctagcatcatgccacatacacttagcagagcaatgggatacataaatgccttccccaggctctgaaaaaaactccaggctttcttttgtttcatgtgggttatctcatataaatgttatatataattagtccattaatactttggtacgaatagagagatatagtttttcttctaaaattaattcatatttaaaagtggcatacagataccgttcaatttcatgaattgcgcgctgtaacaggatgtccttttcaagaaactgttcatagatatcaccaatatctttctgttttattttttcattgcataacacgcgacttgaaaaatatttaaggtgcatcataaatctggaatagttaaatgaacttctgtccacctttctgttataaacaacttcaataagctccgtgattatttgcgacaactcaataatccgtactgattcataatcaactgaattttcataattatttaaaatatgcaatgctataaaaccaatctcatcatcaggaagttgaacgctgaattgctcattaatgatagttaatgcatcgcgacttatcgcatactctgctttgtacaacgctttgatttcatcaaggaaaacattattaatttgtatacctgaaacgactcgggatattgcattcgaaatgtgatccgcaagaatcaatagtagcgatggattgagatttttttcgagatttttctccgcatattgcactattttttcggcaacaaacacatactcaatatctacatgttcaatcaatttatagagtttgtttttttgttcatttctgacataaaaaatccggttagccggatgctcagggaccaacattccatattttttgttgtaaccgacgccaggcccagaaatgataacctcctgtccattcatcgatgcctgcacacaattattgttcatgactttttcgatgatcattccatggctccaaaaaaaaaggcaaggcacgtcagaagtaataactacttcaaacattgccttgcctgatttaacagttacaagatgattaactaatgcgtatacattacacggaattgtgcttaattaaagagatggtcggcttatttttcaagccgacattcaaatatccgacatcagtcacaaaaccagcgtctaatattcaggtaaatgttatctattcaacgaaatataaattcattgaataaataaaaacattatccccttctcgccagcgtcgccccatcggcaaaatacgctttaattcccgcaagaatagactccgcaacttcctgctggaaagtcgccgttttcagtttacgctcttcctcaacgttactgataaacgccgtttcgaccagaatggagggaatatctggtgcctttagtacggcaaacccagcctgttcaacttgatttttatgcagcttgttgattttaccgagcttattcagcaccgctttaccaaacttaaggctgtcggcaatggtcagcgactgcaccatatcgaacatggtgtggtcgacatagcggtcaccgcttttgcttacgccaccaatcaagtccgaggcgttctgggtttgtgccagatattttgccgcagtactggttgcgcctttggttgagagcgcaaacaccgaggaaccgctcggctggcgactggtaaaggcgtcggcatggatagaaacaaacaagtcagcgcgctgtttctgggcttttgctacgcgcacttgcaacggaatgaagatgtcttcattgcgcgtcatgtacaccttcatattgccctctttctcgatcagagagcgcagacggcgagctatttgcaataccacgtctttttcgcgcgttttgtatttccccaccgcaccggagtcttcgccaccgtggccagggtcaagcataatgacaatcggacgatcccgcccagctttacccggttgtggaccactttgtgctggcggcacctgcttttcgaggtcgcctttgttgtaatcctccagcagcgccagcagcgggtcctgcatatcctgtgcattggccggatagaggtccatcaccagacgctctttaaacccggcgaccggcgcaagggcaaacagctgcggttttacgttttgctttaattcaaaaaccatacgtacggtttgcgggtcaaattgcccgacgcgcgccgacttgatgaacgggtcgtcagcgcggatttgcgcagccatccccttgagcaccgagttcaggtttacatcttcgatatccaccaccacgcgttcaggattactcaacgcgaactgcttatatttcagctgacgatttgattctaccgtcacgcgggtgtagctggacgcaggccagacgcgcaccgccacgacctggctgaccgcagccaggctgacctgacttacgctcaatagccacatggcacccgcgccttgcagtaaacgacgacggctgattgcagtgttggatcctgacatgcctctcccgagcaaaagaaatctaagctgtgtaacaagtaaacgaccaatttgaccggaaactttagcgaaagacgcataatctgtcatctataaaacggtaaacattctttttatattcacggtattactgataaaaaactcgctcccgcataaaatttacacttgcaccctgcaaaaaaacagaataaaaatacaataatttcgaataatcatgcaaagaggtgtaccgtggtaaaggaacgtaaaaccgagctggtcgagggattccgccattcggttccctatatcaatacccaccggggaaaaacgtttgtcatcatgctcggcggtgaagccattgagcatgagaatttctccagtatcgttaatgatatcgggttgttgcacagcctcggcatccgtctggtggtggtctatggcgcacgtccgcagatcgacgcaaatctggctgcacatcaccacgaaccgctgtatcacaagaatatacgtgtgaccgacgccaaaacactggaactggtgaagcaggcagcgggaacattgcaactggatattactgctcgcctgtcgatgagtctcaataacacaccgctgcagggcgcgcatatcaacgtcgtcagtggtaattttattattgcccagccgctgggcgtcgatgacggcgtggattactgtcatagcgggcgtatccggcggattgatgaagacgcgatccatcgtcaactggacagcggtgcaatagtgctaatggggccggtcgctgtttcggtcactggcgagagctttaatctgacctcggaagagattgccactcaactggccatcaaactgaaagctgaaaaaatgattggtttttgctcttcccagggcgtcactaatgacgacggtgatattgtctccgaacttttccctaacgaagcgcaagcgcgggtagaagcccaggaagagaaaggcgattacaactccggtacggtgcgctttttgcgtggcgcagtgaaagcctgccgcagcggcgtgcgtcgctgtcatttaatcagttatcaggaagatggcgcgctgttgcaagagttgttctcacgcgacggtatcggtacgcagattgtgatggaaagcgccgagcagattcgtcgcgcaacaatcaacgatatcggcggtattctggagttgattcgcccgctggagcagcaaggtattctggtgcgccgttctcgcgagcagctggagatggaaatcgacaaattcaccattattcagcgcgataatacgactattgcctgcgcagcgctctatccgttcccggaagagaagattggggaaatggcctgtgtggcagttcacccggattaccgcagttcatcacggggcgaggttctgctggaacgcattgccgctcaggcgaagcagagcggcttaagcaaattgtttgtgctgaccacgcgcagtattcactggttccaggaacgtggatttaccccagtggatattgatttactgcccgagagcaaaaagcagttgtacaactaccagcgtaaatccaaagtgttgatggcggatttgggttaagcgatgaaaatcgccggatgcggcaggcgtaacactcgtgcgtcgcatccggcaattacgtttattcccgcgaactaaacaacgccgccagaccactgcgccgctcggtgcgcgtggcaattgccgcacttaaaatgcgctcatcggcatacagcgacagacggcgacgcgcgcgggtcactgcggtgtaaaccagctctcgcgttactaccggcgtgcgttgactcggtaaaatcaacgccgcatggtcgaactccgatccctgcgatttatgtaccgtcatcgcccacgtcgtttcgtgctctggcaggcgactcggttgcacagacttaatattgccgtccggcatcgcaaaccagacgcgcgtcccctgcccgcgatccagcgcaataccgatatcgccattaaacaacccaagcgcgctgtcattacgggcaatcatcaccggtcgaccttcgtaccaacgagagtgcggattacgatgaattttgcgcttctgttgcataaactgctcaattcgctcattcagtccagccacgccaaacggcccttcccgcagggcgcacaaaagctggtactcattgaacgcctgaatgattaaatccggctcggcacgcgcttgcagcagatccagataacgcccgtaacccgcaagagcttcctcaagcatcgcaatataatcttcgccactctgtaaaagccgtttttcgatatcagtaaaatcctgctgaaaaacggttttcactgccgttttatcaccacggttaatcgccgcagctaactgaccaatgccagaatcgctgccgaaacgatagcttttttgcagcaggcagaggctgtcgcgcaaagatgccgcttctgtgccagttcctgctggaacgtggcttcccgtcaggcggctcaactgcccggcacgctcggcggtaaagcccgcgttggcataagcgcagatatcgcccagcacagccccagcctcaaccgaggccagttgatcacgatcgccgagaaagatcactcgcgcatgatcgggcaaggcgtcgatcagtctcgacatcataggaagatcgatcattgacgcttcatctaccaccagcacatcaagatgcagcgggttaccggcatgatgacgtaaacgctggctacccggctgcgcacccagcaatcggtgcaaagtgctggcatcttccggaatgcgtttcttttgttcatcggtcagcggtaattgtcgcaaagccttgccgagagattcggttaagcgcgcggcagctttacccgttggtgcagccagacggatacggcagcgttcgccgtcggccatttgaattaacgctgccagcaacttcgctacggtggtcgttttaccggtgccagggccgccggaaatcaccgagatccgccgcgtcagcgccactgccgccgcaactttttgccagttaatttcatcgcttactggaaaaagtttgtccagggtttgcgccagtagagcttcatcaacctcaatggcatgattcacttcgttgaaaaagcgtgccactgtgcgctcgttacaccacatgcgattcaaataaagacgatcgccacagaggatcatcggcgttggttcatctccccggctgaccgcttgtgaagccagcaagcattcttcccaattttgtagctcaccgatttcactgacacaggtcgccaacagcggatgcgatgcctcgttattttccagtcgtgaaagcggcaaacaaacgtgtccctctccggcatcatgacttaatagtgccgccgcgagggtgacggcaggatgttcatctcccgccacggtcagggcaaactgcacgtccagtgggcgtagctgtttgtgctccacagcttccagtaattgcttttgcaatttcattacgcctcctccagggtcataccggcaaacatctcatccatcagggcaatcaacccggcattgggtcgggttgtgtaaatcccctgttgcggatgttctttatcaacaccacgcaggaacagataaataacgccgccaaagtggcgctcatagtcgtaatcagcaatgcgatggcgcagataacggtgcagcgccagggtataaagctgatattgcagatcatagcggtgcgcctgcattgccgctgccatagcctgttgggtgtaagccgaactgtcttcacccagccagttggatttatagtcgagcaggtaataacgcccttcgtggcggaataccaggtcgataaagccttttaacatgccgcgtacctgcatgaactccagcggcgggcagccagcggatagcgggtcaaactggcgaattagtgcatcaagctggctggcgataagcggttcactaatcggcaggtaaaactccatctccacctgtttatcgcgatcggaaagctgattcaggctaacacccgtttcattgagaggtgcctggaggacagccgtgatccactcggtcaacactggttcccactgcgattcaaagccgccgagttccagtttttcctgtacccagttcgggtcaaccggctgggtaaaatcgaggtcttcaaacaaactgtgcaagaatgtccctggtgacgcaccgcgcgggaactgatgcggtgttaacgtcggttcttcaacgacgctgaccacgcctgcggcatcaacatccagccgtggcatcagatcctgagcgataccgtgaccacgctgctgcaaaccggagtagctggtgacacgccagttatcgccgggcaatcgttgtagcgtcctcgcattcagttctgcagttaaaacatcattaacctgccagggctggttatcaccagtttgtgccgtttgccaggcaatatcatcatcgcataacgcttcaatacaggtgcgaagccctgccgcatcttgtggttcccctttttgcagcaaacgcccaagcgcactttggtggacgtcggtgtcactttttttatcgccacgacggcgcaccagcggtgcaacgccgagactgcaatgccaaaccgaacgcgtcagcgccacgtaaagtaaacgcagatcttccgccagacgttcggcctccgcgaggtcgacgctttctggcgcagcattaagatccagaacggcctcaaacgagtggcgatcgtgatagaacgcctgatcctggacgcggaaattggtaataaatggcaaccagaccagcggatattccagcccttttgatttgtggatcgtgacaatctgcaccagatgtttatcactttcgaggcgcatttgttggctggaggcattactgtctggctcgaggatatgttgcgataaccagcgtaccagcgcatgttcactttccagctgcgttccggcttcttgtagcagttcgctgatatgcaagatatcggtaagacgccgctcaccgcctgccgttgccagcaagttttcagcaatgttacgcgccgacatcagcgcccgcagcatcggcataacgccacgtttgcgccagatttgccgataaccatcgaactcttcgactaccgcatcccacgcatgttcgtcattattcagcgtttcaatatccagcgcattcagccccatcattgacgttgccagcgcactgcgcagggtgttctcacgttcgggtgtcatcaccgcctgcaacagccaaagcatctcctgtgcttccagagtttcaaaaacactgtcgcggttcgaaaggtaaacggaagggatttccagcaacgttaaggcatcgcgcacctgggcggcctcctggcggctgcgcaccagcacactgatgtccgaagcacgtaccggacgtgcatcatcgccgttcatcagcaacgcttccccgcgctgcccggcttgtagccagtcgcggatttgcgcagcacatacctgcgccatggtactttgatagtcgccaacgccgcagctttcgccttccatcagccacattttcatcgcaggctgcgtttcacctttaaatacaaaacgtaacgcctgatttttgccggcagatttcacaggaataaacggtatttcacgaaacatgaacgcgtcatcagtctggctgaaaagtttgttaacgctgttcaccattcccggtgcggaacgccagttggtatctaaggtgtagtgagcatgaacttcgctacgcgccttcatataagtgaagatatccgcaccccggaatgcatatatggcctgtttcgggtcgccaatcagcaacaatgcggtttccggctgatggtgccagatacggcgaaaaattcgatactgttgggggtcggtatcctgaaattcatcgatcattgccaccgggaatcgcgtacggatcgccgctgccaatacctcgccgctttcactacgcagcgcggaatcgagccgacttaacatgtcatcaaaacccaattcgccacggcggcgtttttcacgcgctactgtttcgcggatctcagccaatgcgcgagtgatcaccagatcgcggatcgacaatggttctgcaagcagttgatcgatcgcctcaaacagtggatgtcgcggggtttcccccccggctttcgtgcgatcttctaagaaacgctgagagaatttttccagcgactctggcaactgataactgttggtctcttcttctgcccaggcgctgatcttgtcgatccatttagcctgattgctacggttaaacttgcgtcgatcaataccagaagattcgatcagcgcatccagttcacccactgcgtcgcgccactgctgttttaccgtatcaatacgcgccacaatttgcgcgtggcgggaagccagcgtttcatcatcgggcggcggtgctttgataaccggtgcttcgccttgcagataacgattaatatcgcgcagcaacgcctgcggccctttccaggtttcaaagaccacctgggcaatttcacgcgtcagcgggtagcagtggcgacgccagaaatcggcgcaggcctggtagcgtagcagagactcatcttcaatcagctgctgctcaaacagcatgccggattcaaaggcattcaggttgagcatgcgctggcaaaaaccgtgaatagtaaagactgccgcttcatccatctgccgttcggctaacaacaaccactgcgcggcttgcgctttatcgtcgatctcttccagcagacgtgcatacagcggattgtcagtggtttcacgcaggcaggcgatacgcaactcgtgaatattgctacggatacgaccgcgcaattctgccgtggcagcctcggtaaaggtgaccaccagcagttcttcaacggtcagcgggcggggaaaggcggcggaaccgcctagcccaagtaacaggcgcaaatagagcgctgcaatcgtaaaggttttgcctgtgccggcagaggcttcaatcaggcgctcaccctgtaagggcaagcgcaaaggatctagtgtctcggcgacatcactcattcttttcactcatcaggggcattgtttgctgcaacgcgctgacgttctcccacactttccagccttcaggatgcacatattcggctttcccgttctggctgccggaaatctgcgacagaatagccataccttgcggctcgaccaccgcctgatggaagaaatcagcaagtttttgcggcgtcagcagttttatctgggccacgattttatcacgcgaatcgaagcgcatattgccgcgatcgaaatctttacttaacttcgatgcttcttcgccgagcgtttgcggtgcctgcagcatctgggttattaccgcctgctggatttgcgcaaactcttctggcttcatcgtccgcaattttgcctctgcggttgggaaaaacgccttgtaacgctcccacaagaatgaaggctgtttatcattgctttgcaaaaggaagcccatgccccactgacgccccacgctcattggaaacgcaaacacggcatagcccaactgttcttcggtacgcaactgattgtagaaccacggctgtacgatctgccccaacagagagctataggctgagctggtgtattcatcgtagccagtcggtacaaatatcgctgccagtgcggagtcggtgctgttaccagctttttcaaagatgacggattgttttttatcgaccacgacatctttgttacgacaccactctgaaccatcagcgcccaactgtttttgcacatggcgtgccagcgttgttgcctgggcttcagtcatgttgccgataaccataaactctggtctagcccctgattttaaggcgtcgcgataggccagcacctctttcaacgtaatggagggcaaaattttgcgccgttcatctcgcgagaagtacggcacttgcgagagcatctgcgcgggcataatcgcctgctcaaacgctttgcccttttctgcggaatccatcatctggttataccaggacttcgcctgctcaagctgatcttccgtagcggtatagctaaagtagccctccagcagagcctggaacagctgcggcaggcgctgagtgtaaccattggcattaaccataaggccgttgttagcattggtggaaaaacttatgccaccaaccgacgcctggttgcttaactgatcaagcgccagccctgcgagataatcattgagcgcaaacatcacctgattgcgggcgctgtccatggctttcggattacgcaaaatcaggctgacatcagctttgggctcactggcaaaataacggcttggcgcatacaccacgcgcagattcgactcatcaacaatcaactctggatggtcgtatttcttctctgacttaatcagcgagaaatcgtcaggaatataggggttaagctccggtaaggagagcgcaatattggcggcttttttctgccagtccgcgaaagtttgttcgctgattttatcgacttgatacggcgcatcgacaaaataagccgttttattgtgcggctctttcgggctgatataccagatacgcgcattctgcggcgtcatcatcgccagacgttcttttactgctttagcatcgtaccgatcggcaatattgactgcatccagtgtatgctcaacaggaacgcgaatcatggtatcagccagccattcgacgtaatccatatcacgggtgattgacggataacggaagtcgatatccagcacattcgccagttcatcgaagtattgtttatcgatccctttttcacgtaacagattgagatagctaaaaatggccgccacaacctgatcgcgattcgccagacctttatcggttaaagacgcagagatcgctaatacgccgctgttgccgttgacgataggatcggaattggcgctaataccctcaactaatccctgcttttgcagccagtcagaaagtgtaccagggctgcgattaccaatcagataggtaatcaattcatccgttttactacggaacttcgctgaattgttatcgatgcgaaactcaacgcgcagaactttacgcggcaacgccgggacgtaatgaatgataatgcccttttgcgcgtcggtgactaccggcacggtgatttccggttttttgctctctttgttcggcacgcgaccaaaggtgtccgccgccattttcgccaactccggcaacggtttattgctgtaaataaccgccttcatcagattggcggaatagtacttctcgtggaaatctttcagcgcctgctgtaccggattacctggtttgtcgcttaaagtttcgaggttaccaccagaaaactttgaaccggggtgtgccgggttaatggtttctgcgctgacctgtgccatgcgcatcccgtcacgcgtacgcgccatggttaattcggcattcactgcattacgctcacgttcggcgtatttcttgtcgagcaagggttctgcaatagcatcggccaggcggtctaccgcaccgggtaaggcatcgttctcaacttccagatagaaagccgtgcgatacggtgccgtgctggcattgtgactgccgccgtgcattttgagatattcggccagactgtcagcctgcgggtactttttcgaccccatcagactcatatgttcaaggtaatgtgccagcccctggtacgcctcaggatcttccagcgacccaacgggcaccaccagcgccgagagcgatttaactgcctgcggatcagaaaccagtaagaccaccataccgttatccagacgtatagcctgatactggcggttatctttatcacttttacggatggtttcctgaatcggctgccatcccgtttctgcctgacttaagggtgcccagagggcaacaaacaacaataatgctttgaaccagatgctgcggggcattcacggacctcataatcaactttattttctggccagattcaacacgttaacgcaaatcatctgccagaatttaatcttgtgctgcacgagtcagcctatgtctatataaccatcagtccgtgactggtgcgcatcataaagtaagcggatagattgcgcaatttttatacaatactcatgactgattaaagcgaaacagcggtaacaggaaacgttgcgactgttcaacgatagcctccattgtctctggtgttaattgccgccagagccgttgataccagatatcatcaccttcgccacgcaccatcatgttgccttcgtaagcctgaaggaatttcgtacgggctttttgcaacgtggaatcgtcatccagcatggcatcgttttgcgcgtcataacaggtttttagccacgcgccgccactttcaggtaacaccagcaatggcgcggacattccttcacgatacccttcaatcagctgtgagaggtaatgtaaagcctgttcggctgcaagcggcggaaaacgccactcgccgtctttgcgtagaaaaaggcgactttcaccattaccaccgctggcacagtagacaaggtgttccagccaaagttgcattccctgcgccacacttaataaagagggacgccagcgcaacaggccatccggctgcacctgcggcaaccagccagttatctgcacaccgttgcaggcgagatcaatctccatactctgccctggctggcgacaggcaatgactctgtcggcaagttgctgcatctcctgacactgcgtttcccagaaaatttcaccaaaggcaccatacggcaaatcacctgccgcccggaatcggcggaacaagcgttcggcatcatcctgctcaaccagtacatttaataactgctggttgatttgataacgactaagcccttcaagaataaaaggttcggtgtcggggatttcgctgtcttcggtacggaagttcacctgcaaacgcatctggaaaaatgcccgcaccggatgtgcccagaatcgttgtagcgtttccagcggcacggtttccggtaaggtaaatggcagcggctgaacaaattcagaatgtgctttaccagcctggctggccgcaggtagccattcacgagcatagctttgtcgttcgcctggctggtagttttgtggatcaaacggcattcgggtatggaggcaagtaagatgcgcttttacccttgcctcgctttcatcacagttgagcgcttcatcgcccggtagataatggctttgcccgatgtagtcaatcagttcctgcaccagtaccgacgggaaacgttcactgttatcctgaatggaacgcccgatatagctgatatagagtttttgctgcgcggaaattaacgcttccaggaacagatagcggtcgtcatcgcgacggctacggtcgccacgcttcggtttctggctcatcagatcaaagcccaatggcgcaagctgacgtggataaacgccgtcgttcattcccagcaggcaaaccactttgaacggaattgaacgcattggcatcagagtacaaatgttaaccggtccggcgagaaaacgctggctgatacgttcttgatccaggcgcagtgccagttcatcacgcaatagtgacagcggcaccgcgtcgccatactgcgcacctaaaccttcggcgataatcgcctgccattgttgttcgatcagcgtcatcgccgcttcggtttccgcatccggcaggaaaaaggcgttgagcatatcgcgacaaaccggcaaccactcttccagcggacgctcctgcgccagcccgcgacgccagatatttagctgcattagcagtgaagccagatgccccaccagttctgcaattaagccgctcgattcatcataaggtagaaccgattgccactcgccctgcgcgctctccatcgcgtagcccagcaacatgcgcgtcaggccaaaccgccaggtgtgttgaccggtagcgggaagttccagctcgcgaacgttgtcgtcatctatcccccaacgaattccggattcgttgacccactgacgtaaataacgcagcccttcttcggtgatgtcaaaccgcgctgccagcaccggcacatccagtaatgccagcacgtcttccgacacaaagcggctgtctggcagcgataacaggctgataaacgcttcaagtacaggatgcgactgccgcgcccgacggtcggaaatggcgtaaggcaggtaacgatccgcaggtgcgctaccaaacacagcctgaataaacggactgtagctgtcgatatcagccaccatcacgatgatgtcgcgcggagtaagtgtcgggtcttcctccagcatcgccagcaggcgatcgtgtaaaacttcaacttcacgctgcgggctatggcaaacgtggaaggtgatactgctatccagtggatcaagcgggcgtttgttatcgctacgggaaaactcttcgatgttcacaccagcaacggcgcggttttccagttccagaatgtcagactgaatattatgcagcaggttatctggcgtcacatcgacaaaagcgtccagctcctggctgctctccaggtcagaaaggagataaatgtagtcgcgcccaagcttgccccatgaagccagcagcgggttgccgacatcctgttcaccatcgctgttaaagagctgcccggcattttcgctgtcgcgaaatagcggtaattcgcgatcttcaaaactgtgtcggcgctggcgagtcagtagtttcgccagataagcaggatctttaatgtcgccccagtaataacggcaggggttggtaaacaggagatggatttcaatatgtttacccagcgcctgtagcgcctggagataaacaggcggtaacgcggaaataccgcatataaagacgcgcgaaggtaaccccggcgggcaggtcgtcgcggactccagcgtttcgataaagcgctgatagagattggcgcggtgccagcgcggttgcccaagttcgtcggtatattccaccaacgccttccacaacggcgcttgccaggcctgtgcttctcccaacccttctaccagatgtcctgtttcccactgtgccagccagtccggacgatagaccagatactggtcaaacaggtccgccgcttttgaagaaagctggaacagttttcgcttgtcactatcgtcagtcagataatgccgcaacagggtaaagtcttcgcgctccaacagttgcggcagcagagtcatcagtttccagctcatgctctgtttgttaaaggcgctctctttggggatctccggtaatacccggacgaacatatcccagataaagctcgctggcagcggaaaatcaatgtttgccgcaataccaaacttttgcgacagggtcatttgcagccactgtgccataccagtactttgcaccagaatcatctctggttcgaaaggatcgtccagtcgttcgcgttcgacaataaactccatcaacgcttccagcacgtccagacgattggaatggtagacccttaacatagcggctcctgactactgacgattcgggcaatgcaggcgggtcatctcgccttctctgcccccgggtgaaactagcgtaacgctgatgctgacacatcccgcctgcgatgtctgcattcggttgacctgccagttagcaggtggcgaaatcgcgcgcagttgcgtttgctgccagccatgccgccagagctgttggtactggtttctgctggcaagactgttcattaatgttcgctggaaacccgataacgcagtgacaatcatcaccatcaacaccatcgccaacattacctccggcagactaaagccttgttgattcctcagggaagctgacataacgccctctctttcagcggacaaaaatcgctccagccgcgtggcgaaaaaacaatgtttccatcgatgacttcgcctgttcgccacaacgaaacgccttcataaccagcaatcaataaggcttcattatctgccagtaaacgcagacaaacccgggcaccggtggcagcatacagtaagcactgaactgcgggcagcgtctgccaggagtgcatttttccccactccagcgccgactgaacgatggcctggcggcgcaatgactgactttccatgctcacgcgagaagcaaaactgcgatcctgctgactcattccttgcaatagcaagctacccaaaatcagcagcatcaggaccagagccagtgacgaaacacccttttcgcggttcacaggttggatcctgtcacgctatagctggcatccaccacggtttgcggatcagccttgctggcagcgtgcatattaaccgtcaacaccggcgagaagccgctgacatcctgacgtacgacctgaaaagtgtcgataatgatggcatccggattagtgactttatcccagcccttaccttcacaggatgtcgcaccgcgtagcgtttccagcacatgctccttcagacgaaatccaatctggtcggactcttttaccggttcgcgatcccagataccattactgttcgcatcccactgcacaatgatacagtcaccctgtccgacaatttccagcccttcgcccgtacagctgccatggcaataacccgccctctggagatgcttcgcgacggtaaatacccgcagccagatttcatcttccagcgccagcttacgggtgttcgttaaactttcacgctgtaacgcaggcagaaagcgtgcagcccccagcaacaatacgctactgatcgccatagcaatcaacacttccagcagagaaaaaccttgctcttttacaggcatccttctgtttctccttgctgacaaagccggagtcttccccacggcgaaaccaccagccaccactcgcccgttgagtttttgaagcgaatatgcccggcccatgcggtattgcgcaggccaaagaaagcaagcgaaggtgtcaggtcgctcatttcgacttcgggccagcgcggcacaaagaccaatggtgaactgccatgacaggtattcgccccagcaacggaactcacaaggcaccataacgtcccctccctgataagactgatactgtggtcgcggttatgccagttggcatcttcacgtaaatagagcaaatagtcccgcgcctggctggcggtttgccaaagccgttgcgactgctgccagtattgccagccatagagcccacttgcgcttagcatgaccagaatcagcatcgcgaccagcgtttcaatcagcgtataaccacgttgtgttttcatgccggcagtatggagcgaggagaaaaaaagacgagggccagtttctatttcttcggcgcatcttccggactatttacgccgttgcaggacgttgcaaaatttcgggaaggtgtctcgaagaatttaacggagggcaaaaaaaaccgacgcacactggcgtcggctctggcaggatgtttcgtaattagatagccaccggcgctttaatgcccggatgtggatcgtatccttcaatctcaaagtcttcgaaacggtagtcgaagatggattcgggtttacgtttgataatcaacttcggcagcggacgcggttcgcggcttaattgcagatgagtttgatccatatggttgctgtagagatgcgtgtcgccaccggtccagacaaaatcacccacttccagatcgcactgctgcgccatcatatgcaccagtaacgcgtagctggcaatgttgaacggcaggccgaggaagacgtcacaggagcgctgataaagctggcaagagagtttgccgtctgccacatagaactggaagaatgcatggcacggtgccagcgccattttatccagttcgcctacgttccacgctgaaacaataatgcgacgggaatccgggtcgtttttcagctggttcagtacagtagtgatctggtcaatatgacgaccatccggcgttggccaggcgcgccactgtttaccatacactggcccgaggtcgccgttttcatcggcccattcgtcccagatggtgacattgttttcgtgtagataagcaatgttagtgtcgccctgcaggaaccacagcagttcgtggatgatggaacgcaggtggcaacgtttagttgtcaccagcgggaatccatcctgcaggttaaaacgcatctgatgaccaaaaatggaaagcgttccggttccggtacggtcgtttttctgtgtgccttcgtcgagcactttttgcatcagttctaaatactgtttcatggttcctcaggaaacgtgttgctgtgggctgcgacgatatgcccagaccatcatgatcacacccgcgacaatcatcgggatggaaagaatttgccccatgctgatgtactgcacccaggcaccagtaaactgcgcgtcgggctggcggaaaaactcaacaatgatgcgaaacgcgccgtaaccaatcaggaacaagcctgagacagctcccattgggcgcggtttacgaatatacaggttgaggataataaacagcaccacaccttccagcagcagctcgtaaagctgtgatgggtggcgcggcagcacaccgtaagtgtcgaaaatggattgccactgcgggttggtttgcagcagcaaaatatcttctgtacgggagccagggaacagcatggcaaacgggaagttcgggtcaacgcggccccacaattcaccgttaataaagttgcccaggcgcccagcaccaagaccaaacggaatgagtggggcaataaaatcagagacctggaagaaggaacgtttagtacggcgggcgaagataatcatcaccacgataacgccaatcaggcctccgtggaaggacatgccgccgtcccagacacggaaaagatacagcggatcggccataaactgcgggaaattgtagaacagaacataaccaatacgtccaccgaggaagacgccgaggaagcccgcatagagtaagttttcaacttcatttttggtccagccactgcccggacgattcgcccgtcgtgttgccagccacattgcaaaaatgaaacccaccagatacatcaggccgtaccagtgaagcgccacgggtcctattgagaaaatgaccggatcaaactccggaaaatgcagatagctactggtcatctgtcaccacaagttcttgttatttcgctgaaagagaacagcgattgaaatgcgcgccgcaggtttcaggcgctccaaaggtgcgaataatagcacaaggggacctggctggttgccggataccgttaaaagatatgtatatgatccgcgctataaccccccgcgaatcagcccgcccatgccgcgacgctccataaaggcagcaacctgatggcgaacttcggtcgccagttgcgcttccagactacgctgcgcaagattttctgcttcagcaaaatcaatgcgccgcagcaggtattttacgcgcgctacagaacgtccgttcatagacagatggcgatacccaagcccaatgaggattgccacgcacatgggatcgcccgccatttcaccgcacaaacggagatcgattccatgtatttccgcttcccgggcgatcatcgccagagctcgtaacattgcaggatgaagactgtcataaatgttcgccacccgggtattgttgcgatcaacggccaggatgtattgcgtcagatcgttggtgccaacagagatgaaatcgacccgctttgccagatgcggcagcataaataccattgacggcacttccagcatgatgccgatacgtggtttgggaatttcgtaaccgatcatctcctcgacttcacgtccggcacgttcaatcaggcggcgtgcttcgtcaacttcatcgaggcttgtgaccatcggcaacagaatattcaggttgcccgtagcggcattagcacgcagcatcgcccgcacctggatcaagaagatctccggctgatcgagcgtaatgcgaatcccacgccaacccaggcatggattctcttcgctgatcggcatgtaaggcagctgcttatctgctccgacatccagcgtacgcaaggtgacgggtttatcattgaacatttgcagcatcccctgatactgcgccacctgttcttcttccgacggaaaaccactttgcagcatgaatgggatttcagtgcgataaagtcctatgccatcaatacggctgcccagtttttcttcatgttccgggcttaaaccggcattgagcataactttaatgcgctcgccgctttttaactgggcgggtaaattgacgtcatcttccgccagacggctaagctcaatctcttcactaattagccgctgatattcttgcagcagtaccggctccggatcgaccagcaattcaccgcgataaccatcgacgatcagcgtccgacgatgcagtaccgaaggctgaatatccgcgcccatcacggtaggtatccccagcgcacgtaccatgatcgcagcatgggagttggcagcgccatcgcgcacgacaacaccgactaagcgatcctggggcagctcagcaagcgttgtcgctgacagttcatctgccaccagaatgaaacgttccggccaggcgttcggcccttgattagcgtcatcaagatgaaacagcaatcgctgacccagcgcacgtaaatcgccagcccgctctttgagatagttatcgcttagcgcggcaaactgttcggcaaatttttcaatgaccgtttttaccgcccactctgccaccgagcctttatcaacctcggcaaacaattcgcgacgcagccgggtatccgaaagcaggtgtgagtaaagatcgaaaatagccgccgtttctttttgtgcaccggcagcaaagcgtttgctatagcggcgaaactcgttagccgcctcttccaacgccccggtcagtcgttcgcgttccagagccggatccagcgttgatgcctgatacacctgttccattaaaggtaacgtggcatcctgccagccttcggcaatcgccacaccaggtgctgccggtaatgcacggattcgcgtctggcgatattgcccaaacaaggcagtcaactgcgactgagaaagaatagctgccatctgggtggcaagcgtcaccaggaaggattcttcactttcgtcatactggcgcaactctcgttgctgtaccaccagtacaccaagcaactggcgacgttgaataattggtacgcctaaaaacgcgcggaaacgttcttcttttacggaggggatgtatttgaagctggggtgcttttgcgcatctgcaaggtttatcggttccgccagcctgccaaccaggccgacgatcccttcatcaaacgcgagcgttacagtgcgaccgcgtggttttttcagtccccgggtcgccatcaggtagtaacaacgtcgatcatgatcggccaggtagaccgaacagacctcggtatccatcgcaagacagatgtcggtaaccagaatatttaacgcctcattcaggcgtggtgcgctggctaccttttcgactatttcgcgcaggcgagtgagcataattggcgtgacttaacctcttttacgtcgataagcagatgcgttttgtggttttggcgtattttcctgcagtgacatcaccacactcgcgaactctttcattaccctacggtagacatcacgtttaaatgacaccacctgtctgactggataccagtaacttacccatcgccagccgtcaaactctggtgtactgctggtttgcatattgatttctgcatcgccgctcaccagctgcaagagaaaccatttttgtttttggccgatacaaaccggcttcgtgtcccaacgcaccaaacgtttcggtaatttgtagcgcaaccagttacgcgttgaagcaaggattcgaacgtctttgcggcttaatcctacttcttcaaacaattcacggtacatcgcctgctctgcggattctccggggttgattccgccttgcggaaattgccaggagtgctgaccaaatcgccgggcccacattacctgcccctggcgattacaaatcacgatacctacgtttgggcggtagccatcgtcatcaatcaccggactacctcaaaataaagctttatatacgaatgattgtttcatactccaggaagacggtaaaccactctctgcagggcattacacactaataacaattgaataactcacagttatgtgcagagttataaacagaggaaggggtggatagccgtttttattcaccttttctgtggatagagttgtgaagaactacggaattactacgggaaaacccggagcattctgaataagacagatacagagattttaaaatattcattatcagtcaatgcattacatgtgatttgagtaataaaaaagagtaattcgtgacccaggtcacacctctcatttacgtgttggcgaaagatcaaccaatgccgtatttatccacagaatgtgccactaagttaagcactgaaccactaaaaactggagtttcgtcgcacgtcaaggctgtaaatggaaacagtagtggaggtttttcacagttatcccagctttctgtggataacatggtgtaagatcctgtttattttcagtgaccagatttggaaaacccgttgcagtgttgcgcaactcgtttaccggcaacctaaaaagcaatataaatcagagaattgaacaacgcatgtggaaaaagttacactgcgaatattcagcacataattgctgtttgttttttaaccaaggtatcatgacatgtcccaacctcgcccactgctctctcctcccgaaactgaagaacaattgttagcgcaagcacaacaactttctggttatacattgggagaactggcggcacttgccgggctggttacgccggagaatttaaaacgcgataagggctggattggcgtgttactggagatctggctaggtgccagcgcagggagtaaacctgagcaagattttgctgctctgggcgtggaacttaaaactatccctgtggatagtcttggtcgtccactggaaacaacattcgtttgtgttgccccgttaacgggcaatagcggggtgacctgggaaaccagccacgtgcgccacaagctcaaacgcgtgctgtggataccggttgaaggcgagcgcagcatcccgctggcaaagcgtcgcgtaggatcaccgttgctgtggagcccgaatgaagaggaagaccggcagctacgcgaagactgggaagaattaatggatatgattgttctcggtcagattgagcggatcaccgctcgtcacggggaatatttacagatacgaccgaaagcagcgaatgcgaaagcgctgaccgaagctattggtgcccggggcgaacggattctgacgctgccgcgcggattttatttgaagaagaatttcaccagtgcgctactggcccgtcattttctgatccagtagccatcgctttgacctgctgctttccgggcatataattaccgcttcatttttttggcagggctttttagatgttatttgcatggataaccgatcctaacgcctggcttgcgctcggtacactgacgctgctggagatcgttcttgggatcgacaatattattttcctttctctggtggtggcaaagcttcccacagcacaacgtgctcatgcgcgccgtctggggttggcgggagccatggttatgcgtctggcgctgctggcatccatcgcctgggttacgcgcctgacgaatccgctttttacaatattcagtcaggaaatttccgcccgtgatttgatcctgcttctgggtggcttgttccttatctggaaagccagcaaggaaatccacgaatccatcgaaggtgaagaagaagggctgaaaacacgcgtttcatcattcctcggcgctatcgtgcagattatgctgctggatattatcttcagcctcgactcggtgattaccgctgtgggtctgtcagatcacctgtttattatgatggctgccgtggtgattgccgtaggcgtgatgatgttcgccgcgcgctcgattggtgattttgtcgagcgccatccttcggtaaaaatgctggcgctctctttcctgattctggtgggctttaccctgattctggaaagtttcgacatccacgtaccgaaaggttacatctacttcgcgatgttcttctctattgcggttgaaagcctcaacctgattcgcaacaaaaagaatccgctctgatactccgtacgctctcctgcgggagggcgtactcactcctgttaccctcacagtttaagattttcctgctttcaagatatataacgtcggtttataaacagactattatcataggtgggccaaatgaggataaccggatgaaaaaatgggcagtaataatttctgcagtcggactggcgtttgctgtttccgggtgttccagtgattacgtcatggcgaccaaagatggccgtatgattttgaccgatggaaaacctgaaattgatgatgataccgggctggtgagttatcacgatcagcaaggtaacgcgatgcaaattaaccgtgatgatgtttcgcaaattattgaacgttaacaaataaggtcagcatccggctggccttaagatttttctctttcccttttcccttccctctgccatttttatattccttatgtcgtgattataaaaaggaaacggctatgcaatatcaccgtataccccacagttcgctggaagtcagcacgctggggcttggcacgatgacgtttggtgaacagaacagcgaagccgacgcccacgcacaactcgactatgccgtcgctcagggcattaaccttatcgacgttgccgaaatgtacccagtacctccgcgccccgaaactcaagggctaaccgaaacctacgtcggcaactggctggcgaaacatggcagccgcgaaaagttaattatcgcctccaaagtgagcggaccgtcgcgcaataatgacaaaggcatccgcccggatcaggcgctggatcggaagaatatccgcgaagcgctgcatgacagcctcaagcgtctgcagactgattacctcgatctctatcaggtgcactggccgcagcgcccaaccaactgcttcggcaaactcggttatagctggacagattctgcgcctgcggtttcgctgctggatacgctggacgcactggcagagtaccaacgcgcgggaaaaattcgttatatcggcgtgtcgaacgaaactgcatttggcgtaatgcgctacctgcatctggcggacaaacacgatctgccgcgtattgtcaccattcagaacccctacagcctgttaaaccgcagttttgaagtaggtctggcagaagtcagccagtatgaaggggtcgaactgctggcctattcgtgcctgggtttcggcacactgaccgggaaatatctcaatggtgcaaaacccgctggcgcacgtaatacgctctttagtcggttcacccgctatagcggtgagcaaacgcaaaaagccgtcgcggcgtatgttgatatcgccagacgtcatggcctggaccctgctcagatggcgctcgcatttgtacgccgtcaaccgtttgttgccagcactctgctgggcgcaaccacgatggagcagctgaaaactaacgtcgaaagtttgcatctggagttgagcgaagacgtattagctgaaattgaagcggtgcatcaggtttatacgtatcctgcaccataagattaacgccggttaaaaccggcgttaaatattaatgacggcgctgccagatccacagcgccgttattgccagcgcaaacagcgcaccgaagccaatgccaatgggcacgaccgggatgcctaccattaccgccagcgagtaaatgcccagcatcaacaacatggcgctgttttcgccaaggttttgtactgcaatcgcattccccgccccgacgctttttttaccccgctcctgtagcaacgcattgagcggaacgacaaaaaagccccccagcacgccaatcagcatcaacaaagcataggctggcagcagctcgtgttgcagggagaaaatcagtaccaccacgccaatcaaaatcccggctggcatacagcgtgacacggtttccagcgtaaccagcttcgctgccgcacctgcgccaaccacgataccaatcgctaccatcgcgttgagataggtcggcgtagcgttatcggtaatacccagcgccaccggtacccacagcaccaacaggaaacgcagcgtgacacctgctccccagaataaactggtgcccaccagcgaaaaacgcgtttcaccattgcgccatagcgaggtgcaggcattcaggaaactgcgggtcatgctgatgagattccaggactgccccggacgcgccgccgccagtttgggaatgtagatattggcaacgaccgcgccaccgtaggccagtgcgcatgcggccagggcaaccagaatatgccagtcagccagaacaccaccagctacggaaccgagcaaaatcgccgctatggtagacgcttccattaaaccgttagcttttactaacttactacccgtggttaattcgccgagaataccgtatttcgccggtgaataggctgcagcaccaacacccaccaacgtatagccgagaaacggattgataccaaagcagatactggctgcgcccagtagcttcaggccgttggcaaacatcatcacccggcctttggcgaagctatccgccacctgcccgacaaacggcgcaaaaagaatgtaagcacctacaaacaccatttgcaggatgggctggctccactccggatagaactgcgctttcagtaacgccagagtggcaaacagcagcgcattatcgccaaacgcagagagaaactgcgccacgataaccgctttcatccccttcgaccacaacgaagtgttagtgtgcactgactcactcatcgtgttgttccgcttcgtctacccagcttttcaacgtgacaaagtcaggtttgccgctgccaagtaatggcatctgtttcagatagcgaatatcgcgcggtacagcaagctccggcacgccgtgctcgcgggcatactgttgtaacttatcgcgcgtcagttcgttatctgtggtgaaaagcaccagtgcctcgcctttgctggcatcgctcttaatcgcagtggcatggactttatctggcgaaacaccaagtgccagttgttccaccatttccagcgacaccatttcgcctgcaattttggcaaagcgttttgcgcggccctgaatctgcacaaagccctgctcatcaaaacgcacgatatcgccagtgtcataccagccgcgctccatttcgccgcgaacattctcggcggtgggcacttccagtacaccaggcttctccacccgcagatagccgttcattatgttcggccctttcagttgcaggcgtccgccctcttcgataccaggaactgacaacaggcgcgcgtccatacctggtagaatacgccctaccgtaccgggtttcgccgccatcggtacgttgatagaaacgacaggcgcgcactcggtcacaccgtagccttcaaggatgcgcaggccaaatttatcctgccaaagctgtttggtactttcttgtagtttttctgcgcctgccaccacatagcgtagacgatagaagtcatacgggttggcgaaacgcgcgtagtgaccgaggaaagtcgaggtaccgaacaacacggtgcaactgcggtcatacaccaactccggcacaatgcggtaatgcagcgggcttggataaaggaacacttctgcacctgtgagcagtggcgtaaacaggcctaccgtcagcccaaaggagtgaaacagcggtaacgccgacataaagcgatcgttggtggtgaagtcggcaatcgttttaatctgctcgacgttcgccagaatgcttttatggctatggacgacgcctttcggatggccttcagaaccggaggtaaagaggatcagcgcctcttcttccggctgctgttttaactgtgccagacgcggcatcagcaaatgagcgaaaatccacactttgtcggcagtggtgacatctgcttttaaatcttccagatagacccagcgtacctgagtaagttgctccggcagatgccagagtttgcctttatcgagaaactgacgggaagtgaaaatggttttgatttcagccgccgtaatagcactggtcaacccttttaccccggcggtgtagttcatcattgcgggaatgcggcgacgggcgatggccccaaaaatcactgcagcactgatgcctgcattgggcagcattaagccgatgcgttcgccttcaacactgtatttttcaaggatgcgtccaacaaacagcgttttcgtaagcaatttgcgataggagtctggggtaaagttgacgtcttcgacacatttcttcccggctccgaagcggtacattgcactcagtaaagattcgtacagcgtttcacgcgggcgcaccgccatacgcgcttccatcattatttgatgcagcatttcgccagcgattttgcgacggtcacgggcacgcggcgcatccggcatctccacctgcgttggtggcaaaatatgcagagtaatttgcgggaacaagcgacgtttaaccagacctttcaggcggctgaagtgcgtaagttccgccccttcaatacgcacaggaataaccgttgcaccagacttcgccgcgacaaatcccgcgccatcgtagattttcatcagcgagccagtggtggtgatgcgtccttcagggaaaatcaccactggtcggccctgttccaccagacgtaccagatgtttaatcgccataggttgcgtcgggtcgagaggaacaaagtcgataaatgatttcagccaacgcatataccactgttggcttattgaggtgtaaacggcaaataccggacgtacgggtaaaaacaatgccagcagtatgccatcaataaaagagacgtgattaggcgtaattagaacgcgctcgcccttcagtgccttggtgtcacccgtaacgcgaacgcgatacaaaacacggcacaaatttcgaaaaaagctaaaaagcattccaactccctttgctctgattcagtaaaagcgaatggagggagattacacgagataaagaacgcgagcgacagtaaattaggtgcgaaaaaaaacctgcgcatccgcgcaggttggtgcaagagacagggtacgaagagcgtaccgaataatctcaccaatcaatacctctgggatcttgattgtggtctgcacgacgactcttcgccagcgagaaaacgcaaaggaatgaagggaaatgcaacgaggtgtgtaaattgtcggttactgttacagattgatgaccggcaaaaaaatagcacaaaaaaaacctgcgcatctgcgcaggctggtgtaattcatgtgctcaacccgaagttgacttcacctatcaatacctctgggatcaccactttagcaacctgaagccaaacgccaccagcggtcaatcgcaacagcgtttcgcaaagtgtaaccaaaggtttgcaatctctttttttgtcttacttatttgcgtttggctcacattcccacgatgaaaacatgtcaccccttgaaccaacgggcgttttccgtaacactgaaagaatgtaagcgtttacccactaaggtattttcatggcgaccataaaggatgtagcccgactggcaggcgtttcagtcgccaccgtttcccgcgtcattaataattcacccaaagccagcgaagcttcccggcttgctgtgcatagtgcaatggagtctcttagctatcagcacaaaaaaaaacctgcgcatctgcgcaggctggtgtaattcatgtgctcaacccgaagttgacttcacctatcaatacctctgggatcaccactttagcaacctgaagccaaacgccaccagcggtcaatcgcaacagcgtttcgcaaagtgtaaccaaaggtttgcaatctctttttttgtcttacttatttgcgtttggctcacattcccacgatgaaaacatgtcaccccttgaaccaacgggcgttttccgtaacactgaaagaatgtaagcgtttacccactaaggtattttcatggcgaccataaaggatgtagcccgactggcaggcgtttcagtcgccaccgtttcccgcgtcattaataattcacccaaagccagcgaagcttcccggcttgctgtgcatagtgcaatggagtctcttagctatcacccgaacgccaacgcccgtgcgctggcgcagcagaccactgaaacgatcggtctggtcgttggtgatgtttccgatccgtttttcggcgcaatggtgaaagcggtcgaacaggtggcttatcacactggtaattttttattgattggcaacggttaccacaacgaacaaaaagagcgtcaggccattgagcaactgatccgccatcgctgtgctgcgctggttgtccatgccaaaatgatcccggatgccgatttagcctcattaatgaaacaaatgcccggtatggtgctgatcaaccgtatcctgcctggctttgaaaaccgttgtattgctctggacgatcgttacggtgcctggctggcaacgcgtcatttaattcagcaaggtcatacccgcattggttatctgtgctctaaccactctatttctgacgccgaagatcgtctgcaagggtattacgatgcccttgctgaaagtggtattccggccaatgaccggctggtgacatttggcgaaccagacgaaagcggcggcgaacaggcaatgaccgagcttttgggacgaggcagaaatttcactgcggtagcctgttataacgattcaatggcggcgggcgcgatgggcgtgctcaatgataatggtattgatgtaccgggtgagatttcgttaattggctttgatgatgtgctggtgtcacgctatgtgcgtccgcgcctgaccaccgtgcgttacccaatcgtgacgatggcgacgcaggctgccgaactggctttggcgctggcggataatcgccctctcccggaaatcactaatgtctttagtccgacgctggtacgtcgccattcagtgtcaactccgtcgctggaggcaagtcatcatgcaaccagcgactaaccgcagttaaagcaattccagcgccagtaattcttcaatggtctggcgacggcgaatcaaccgcgcctgaccattatcaaacagaacttctggtaacagcggacggctgttgtagttggatgacattgatgcgccatatgcccctgtatcatgcagtaccagataatcacccgccttcacttccggcaaggcgcgggtttcgacatttcccccttcctgctgggtaaagacatcgcccgattcacataacggcccggcgacgacggtttccaccgttggcgcgtgttccagagaacgaccctcagctgccagggcactgatatggtggtaactaccgtacattgccgggcgcatcagatcgttgaacccggcatcaaccagcacaaagtggcggctacccatttgtttgacgctccgcacttgagtaattaatacgccagcctgcgctaccagaaagcgacccggttcaatttccagtttcacaggatggcccaaatggcgggcgatttgctcacgcgcggcattccacagaccataataatgttcggtatcaaccgcctcttcaccctgttgataaggaatagaaagcccaccgcccgcagaaatagcctgtaaatcctgaccgaactcgaggacctgacgcaccatagcaccacatacctgttccagatgggcataatcgacgccagaaccaatgtgcatgtgaatgccgaccagctgtagatgatgacgttgtatcacgtccagtgcggcgggcagatcggtgtaccagataccgtgcttgctgttttcgccaccggtattggttttttggctatgcccgtgaccaaaccccggattaacacgcagccatacccgatgccctggagaaacctgacccagttggtcgagcatatcaacagaacccgcattcaccggaatttgcaattcactgacgcgttcaagcgtcgcctgatcgataacatctgccgtaaaaacaatatcatcggggtgcgtttgcggattgtaacccgccgccagtgcacgctctatttcgcctaacgagacggaatccacttttacgccctgctcacgcattaagcgcaaaatatgaatattggaacaggctttctgtgcaaagcgcaccacatcaaactgtttcagcgctgcaatctgccgacgaataatttgcgcatcgtagacccacaccgggcagccaaattctgcgggcaaacgcagcagattttcggcggtgagatcggtatcagtgctgaacagtgaatgtggcataacaaactccagataagtgcttttttatgattacgccacatcataaaaagaataaaaaatatcgatttatgtcgagtctatgcaaaaatgatatggattaccggattgcgagagagcgctaatggccgcagttaacttacgtcatattgaaatttttcatgcggtaatgaccgccggaagcctgactgaggcggcacacctgctacacacctcacagccaaccgtcagccgcgaactggcgcgctttgagaaggtgatcgggctgaaattgtttgagcgcatacgtggacgattacatcctaccgtgcaaggactgcgtctgtttgaagaagtgcaacgatcctggtacggactggatcgcattgtcagtgccgcagaaagtctgcgcgagtttcgccagggagaactgtctattgcctgcctgccggtcttttcgcaatcttttttaccgcagctcctgcaaccctttctggcacgttatcccgatgtcagcttaaatatcgtgccccaggaatcaccgctacttgaagagtggctctcggcccagcgtcatgatttaggactcactgaaacgctccatacgcctgcgggaacagaacgtaccgaattactctctttagatgaagtgtgtgtgttacctccgggccatccgctggcggtaaaaaaggtattaacgccggatgattttcacagtgagaactacatcagcctttcccgtactgacagctatcgccagttgctggatcaattgtttactgagaatcaggttaaacgacgcatgatcgtagaaacccacagcgccgcgtcagtctgcgcaatggtacgggcgggggtaggcgtttcggtggttaacccgctcaccgcactggattatgcggcaagcggtttagtggtgcggcggttcagcattgcggttccattcaccgtcagcctgatccgccccctgcaccgcccgtcatcagcgctggtgcaggcgtttagtgagcatttacaagcgggattaccgaaactggtcacttctcttgacgctattttgtcgtcagctacgacagcataaaagcgacagcatcctcggcatggatcgccgcggtatcaaacacaggcagaacactgcgctcttctggcaccagtaaaccaatttctgtgcagccaaaaatgacgccctgtgcgccctgttctgcaaggcgagcaatcacttgcgcataataagcgcgtgacgcttcggtaaattgccccagacacagttcttcaaaaataatctgattaattttcgcccgttcatccgcttcaggaataagacagttgatggaaaattgttccgtcagccgcccgcgataaaaatcctgttccatggtgtaacgtgtacccagcagcgccacacgagtcattcctgccccggtaattgcacgtccagtggcatccgctatgtgtaagaaaggcagagagcaacgagactcaatggcatccgccactttatgcatcgtattggtgcataacacaataccttctgcgcccgcccgctgtaagccaagcgccgcctcagccagaatatccccggttttgtcccactcaccgcgacgctggcactcttctatttcatgaaaatcgacgctatgtagcagcacttgcgcagagtgaagcccaccaagccgctgtttaatgccttcatttatcagacgatagtaaggaatagtggattcccagctcattcctcccagcaaaccaattgttttcattcctctctcctgatgtgtgttaccgcaacaaggctgaataaggaacgagacaaacgcctcaacggccaggtgcccaatctctattaacgaaaaaagggccggatgtacagcacatccggcccgtgaaatcagacgccgatatttctcaacttttcgcctgccatcagtttgcgctcgatatgttccagcgtgacatttttggtttccggaatgagccagaaagtgatgcccacaaacgcaatgttcagcgcagtgtagagccagaacgtaccggcagcgccaatgctatcaagcagtgtcaggaaggtcgcgccgataatcatattcgacacccagtttgtcgtcgttgagcaggtgatgccaaaatcgcggcatttcagcggctgaatttcagagcacaagatccacaccactggcgcggcgctcatcgcataaccggcaatacacatcatcgtcatgccaacagagagccaggacaagccactggaagccgtaccgttatcaaactgcatcaggcagtaacccagcaccagagtgcctaacgccatcacgctgaaaccaattttcagagccggcttacgccctgctttatctaccgtaaagaccgcaatgaaggtagcgaacataaaggtcagccccacgaccagagtcgcaatcatctgttgttctgtggtcgtaaagcccgccattttgaagatacgtggcgcgtagtacatgatgatgttcataccggtaaactgctgcatcgcctgcaacaacataccgagaaatacagcacgacggacgttacggttgatcttaaacagtgcccaaccgccctgttttaacttcaggctttcacgaatttcgttgagttcttctcgcgctttttccgacgtatcgcgcagcatacgcaacacttcttccgcctcaatatgacgccccttttccgccagccagcgcgggctatttggcaggaagaccaccagaataatcagcaggactgctggtaaagcaagaacccccaacattgcgcgccagttaccgctataactgaacgctgtatcggataaaaacgccagcacgatgccgagtgtgaccatcaactggtacatgctgatcatcttaccgcgaacgttttcacttgccatttcagaaagatatagaggagcggtgtaagacgcgatcccaacagcaatgcccaacaccacacgagcggcgattaacatctctacgctggtcgcaaaagcggaccctatcgaaccgagtacaaacaggatggcccccgccatcaggctgtatttacgccccaggcggaacgacagccacccattaaacagcgcaccaattgctgcgccgagcatcatgctactgaccacccattcctgcaaacggctggtcagcacaaagtgatcggtaatgaacggcaacgctccggcgattacgccgatatcaagaccaaataacaatcctgcgaccgcagcagctaccgaaacaaacatattcatacgccgcgtatcccgcagaggacgtggcgttaaagcagattccgtattgatagtaaccattttttcctgccagcagagagtaagacatagtgaaaaaatacgtgaacaactcacacaggtgtcaggtcggaaatagcataaatatggattaaattgctgcgacatgtcgttatgtgatggatattccaattttcaaattaagttgaattattgagattattattaaccacataattttaaagcagataaaattcataaagttcattaattgataattgatatggattatttcataaccatgatatggattatgatgatctacagatataaaaaaccctgccatgcggcagggtcataaaagtaagaggaatgaattaacgcgccagccaaccgccatccacagcaatggtataaccatttacataatctgaagcgctggaggcaagaaacactaccggccccatcaggtcactcggcagtccccaacggccagccggaatgcggtcgagaatttccgcgctacgttgttcatctgcccgcagttgttgggtattgttggtcgccatgtaacccggagctatcgcattaacattaatgttgtgtttagcccattcgttcgccatcaatcgcgtcacacccatcacgccgctttttgatgcggtataagaaggcacacggatcccgccctggaaggagagcattgacgcgatattgataatcttgccgccattgccttgcgcgataaagtgtttcgccgctgcctgagacatgaagaatacgctcttgatattcaggttcatgacatcgtcccagtctgtttcgctgaactcgagagcgtcttcgcggcgaatcaatccggcgttattcaccaggatatcaatatgaccaaactccgctaccgcgcgatccagcagtccaggaatgccatcaatctttcgcagatcggcggtcaggcttaaaaaacgacgcccctgcgccgtgacctgcttgatggtttcagtcggttcaacgatgttaatgccaacaatgtcacagcccgcttgcgccagccccaacgccatcccctggcccagcccagtatcacaaccagtgacgaccgcaactttaccttcgagagaaaatgcatttaaaatcataacaataccttattcgtttatgcccacaactagcgcaaatctttaacggccacatggtccatatcatcaaaaacctggttttcaccgaccatgccccagataaaggtataagctttggttccgacgccggaatggatcgaccagctcggggagatcaccgcctgctcgttatgcatcacaatgtgacgcgtttcttgcggttgccccatcatgtggaaaacgcaggcgtcatcatccatattgaaatagaaataaacttccatccggcgctcgtgggtgtgacacggcatggtgttccacaagttacctggagccagctccgtcagccccatactcaattggcaggtttccagcacatccgggacaaaatatttgttaatcgtgcgacggttactggtgaggttatcgcctaacgtgactggagatacttcgtccggtgtgacttttttggtgggatacgtcgtatgcgcgggtgcgcaattgtaataaaacttcgccggagtggcggtatcaatactggcaaagacaacttcttttgcacctttaccaacatacagggcgtcgcggtgaccgatttcatagcattgaccatcgacagtaatcgtaccggcaccgccaatattgataacacctaactcgcgacgttcaaggaaatagcttacgccgagttgtttaccaacttccccgccaacggaaaccgttttagttaccggcataatgccgccaacaataatacggtcaatgtggctgtaaaccatggtgtactcatcggcgacaaataccttttcaaccaaaaattcattgcgcagcccctgggtatccagcgtttttgcgtgcgcactgtggatgctctgtcttacgtccacatcaacctccgataatcagtgaagcgtgaaaatagaaaacaataataaaacactgtttcgttttctctatgaggggatgatatgcccatgggatagggttttcaattaaaaataaaacaatgtttcattttcaagttaaggattaaaaaaagtgcagtgtcgatcacgaatatgtcatgagaatggaaaaatcagggagccctgaaaaggtatgtcgactcaccagccatcattattcaacagattaatgacggcagatatttatcggtaaggaggaaatgcagagctactcgtcacgttcaatggtcaatgccacaccctggcccccgccgatacaaagcgttgccagtcctttgcgggcattacgtttcaccatttcatgaacaagagaaaccaggattcggcaaccggaagcgcctatcggatgaccgagtgcgatcgcaccaccattgacattgacccgacgctcatcccattcaagcatcttgccaaccgaaagcgcctgtgcagcaaacgcttcattagcctcgataagatcgacatcagccaactgccagccaacacgctccaggcaacgacgggtcgcatacaccggcgcaattcccatcaatgccggatccacaccaacgctggcaaatgcgcggatgcgggccagcacgggtaaattcaacgctcgtgctttggcttcgctcatcatcattactgcagctgccccatcgtttatggatgatgcattacccgctgtcacagaaccgagactatcaaatgaaggatttaaacgggctaaggcttctgcgctggtgtcagtgcgtggctgttcatcggtatcaacaaccaacgtctgtccgttactttgggttattaccgggacgatctcatctttaaatcgtccggcgtcaatcgccgctcgcgctttttgttgcgagctaagtgcgtaagcatcctgcaactgacggctgatgccatattcgcgagccagattttcggcggtgacaccaatatgataatcattgaaggcatcccacaacccatcatgcacaagactatcaaccaactggctattgccaagctgtgcgccggtgcggctatcagtcagaacatgtggtgcgcggctcatgttttcctggccaccggcgatgacaatatcagcctcgccacactgtatcgcctgagtagccagatgcagtgctttaagcccggaaccacaaacgtcattaatagtgattgcagaaacgctattaggaagaccacctttaatagccgattgtcttgccggattctgccctgcccctgcagtcaacacctgaccaagaatcacttcatccaccgcatatgcaggaacgccggtacgttctattaacgctttgacgaccaggctgccaagttccacggcggaatgacccgctaacgcaccacgaaagcagccgataggtgtccgtaacgccccgacaatcacaacgtctttcatcacaacctcgcaccaattaacagtgcaatagtaaatgattgttaattacagttatcttaattgtttaaaaaaagtgactattatcacaaaggaaatacgcctgagtagtagtcagagacataactggcacgtaaggtttgcaaccactaactcaccaatagagaggtagatagggcgttaatctcccatacttaacctggtttatggtaaattgccctccattttgtttaatttgtagatgatacgttcagataatgtctaatatttggtcaaaagaagaaactctgtggagtttcgcgctctacggcacagccgttggtgcaggcacgctcttccttcctattcagttaggttcggcgggggctgtggtcctgtttattactgctctggtcgcctggcctttaacatattggccacataaagccttatgccagttcatcctctcatcgaaaacatcagcaggtgaagggataacgggcgcggtaacacactactatggcaagaagattggtaatctgattaccacgctgtacttcatcgccttttttgtcgtcgtgttgatatatgcagtggcaattaccaactcacttacggaacagctggcaaagcatatggttattgatcttcgcatccgtatgttggtgagtctgggggttgtattaatcctgaatctcatttttctgatgggacgccatgcaaccattcgggtaatgggatttttggtattcccattgattgcctatttcttatttctttctatttacctggtcggtagttggcaacctgatctattaacaacccaggtagagttcaatcagaatacccttcaccagatatggatatcgattcccgtgatggttttcgcttttagccatacgcccattatttctacgtttgccatagacagacgtgaaaaatatggcgaacatgctatggataaatgcaaaaaaattatgaaagtcgcttatctcatcatctgcataagtgtattgttctttgtctttagctgcctgctttctattccaccttcgtatattgaagcggctaaagaagaaggggttaccattttatcggcgctttctatgctgccgaacgccccagcatggttgtcaatttccgggattattgtcgcagtagttgcgatgtcgaaatcattcctgggtacgtactttggcgttattgaaggtgccacagaggtcgtcaaaacaacattacagcaggttggtgtaaagaaaagtcgtgcatttaaccgcgcactatcaattatgttggtatcgctgattaccttcattgtttgttgcattaacccgaacgcgatttcgatgatttacgcgatcagcggcccgctcattgccatgatacttttcatcatgcctacgctgtcaacgtatctcatcccggcgcttaaaccctggcgttccatcggaaatctgattaccctgatcgtgggtatcctgtgcgtatcggtaatgttctttagctaatatccgttgtggatggttcaaaattgcttcaattttgaaccatcccagttttcataatgttcatttgttattattccgctctatcacttctctcgtaatattatataattatcagccagttaaacacacaaagagttctgaacatcttaaataagactatttaagatacatgacgattgcattgcgtaaacgctttttatttacaaaaaaatggggaagtattacggcgattgcgaaaagtctgaagcgcttgaattaagataatatagaaaatcagatacaacaaaaatggcaggcagatgatgtgaagataaattggagcgggcgaagggaatcgaaccctcgtatagagcttgggaagctctcgttctaccattgaactacgcccgcttcgagatgcgtaaggcattataaaccttacgctctccttagcaagtatcacgctgctgactgctgattaattcgccatcagcattttggcttgctgccctgaggcggcaagtaacgtagcggatcaattgccgttgcacggtaacgaatctggaaatgcaagcgaacagatgccgcatcagtgctccccatggtagcgattttttgcccagccttcacgctttgcccattatttaccagcatcgtgtcattatgagcgtaagccgtaatgtaatcttcactgtgtttaatcatgatgagattaccgtagccacgcagctggttgcccacatacaccacctttcctgcacccgcggcgtaaataggtgtaccccgtggagctgagatatcaatccctttattgccgccatctgctgtcgaatacggcatgataactttccctgtcgttggccataaccaacaacgttgccctactggcggccaggaagatttcggtaccgctgatgacggtgtaaccgatgcggttttggtcgttgatttggcggttgatttacgtgtactactgctacttttcgccccacccagttttagtttctgacctacttcaatggtgtaagggggggaaatgccgttcagtcgcgccagttcttttacgctggttcccgtggtgcgcgaaatacgatatagcgtatccccccgtttcacggtgtaaacggagccggaatacgttcctgtatcggatgatttgctacccgaacagcccgccaaaagcagtccaaccgataacaacatcacgatacccagagattttttattcaggcgtcccgcactcaaaatctttcctcgcttaaaaaacaagacgccatatcatagcagccagcctcttgatacccaatctcttgcttctggaaaaacgatgtaatagagaaagaggttaatttcatttggcaaagggaagtatcatcagcaaaatatttgctgtagtggtatcgaagttcctgacttttaccctatttcccaccttgatgcgtaataatcctaatttatcacattgattttatcgccactcatattgatacgtatcactgtccctattcagagtcctgtttcgtatcatatctgtgtttttttaacgtcatcacacttccttcctcccctcacgcatatagtcgtttctggcgtaattcttgcctgctaagactaaatctttgccataagaaccaaatgttcaaaccgaggggatttctatggaagcgcgggaagcaaccgctacgggtgaatcatgcatgcgcgtcgatgccattgctaaggtcaccgggcgggcacgatatactgacgattatattatggcgggcatgtgttacgcgaaatatgtacgtagccctatcgcacatggttatgctgtaaatattaatgatgaacaagccaggagtttgccgggcgtcctggcgatttttacctgggaagatgtgccagaaatcccattcgccacggcagggcatgcctggacacttgacgaaaacaagcgcgataccgccgatcgtgccctgctaacgcgtcatgttcgtcatcatggtgacgccgttgccatcgtcgtggcccgcgatgaactcacggcagaaaaagcggcgcaattggtcagcattgagtggcaagaattacccgttatcacctcgccagaagcggcgctggcagaagacgctgcaccaatccataacggtggcaatttactgaaacaaagcacgatgtcgacgggtaatgtccaacaaacaatcgatgccgccgactaccaggtacaggggcactatcagactcccgttattcaacattgtcatatggaaagcgtgacatcgctggcatggatggaggatgactcgcgaattaccatcgtttccagcacccagatcccgcacattgttcgccgcgtggttggtcaggcgctggatattccctggtcatgcgtacgagtcatcaaaccgtttatcggtggcggttttggtaataaacaggatgtactggaagagccaatggcggcattcctgaccagcaaacttggcggcattccggtgaaagtttcccttagccgtgaagagtgtttcctcgcaacccgtacccgccacgcttttactattgacgggcaaatgggcgtgaaccgcgacggaacattgaaaggttatagtctggatgttctgtctaacaccggcgcttatgcatctcacgggcactccattgcttctgctggggggaataaagtcgcttacctttatcctcgttgtgcctacgcttacagttcaaagacctgctataccaacctcccctcggctggtgcgatgcgtggttatggcgcgccacaagtcgtatttgccgttgagtctatgcttgatgatgccgcgacagcgttaggtattgatcctgttgaaattcgtttacgcaacgccgcccgcgaaggagatgctaatccgctcacgggaaaacgtatttacagcgcagggttgccggagtgtcttgaaaaaggccggaaaatctttgaatgggaaaaacgccgtgcagagtgccagaaccagcaaggcaatttacgtcgtggcgttggcgtcgcctgttttagctacacctctaacacctggcctgtcggcgtagaaatagcaggcgcgcgcctgttgatgaatcaggatggaaccatcaacgtgcaaagcggcgcgacggaaatcggccagggtgccgacaccgtgttctcgcaaatggtggcagaaaccgtgggagttccggtcagcgatgttcacgttatttcaacccaagataccgacgttacaccattcgaccccggcgcatttgcctcacgtcagagctatgttgccgcgcctgcgctgcgcagtgcagcactgttattaaaagagaaaatcatcgctcacgccgcagtcatgctacatcagtcagcgatgaatctgaccctgataaaaggccatatcgtgctgattgaaagaccggaagaaccgttaatgtcgttaaaagatttggcgatggacgctttctaccaccctgaacgcggcgggcagctctctgccgaaagctccatcaaaaccaccactaacccaccggcgtttggctgtacctttgttgatctgacggtcgatattgcactgtgcaaagtcaccatcaaccgcatcctcaacgttcatgattcgggccatattcttaatccgctgctggcagaaggtcaggtacacggcggaatgggaatgggcattggctgggcgctatttgaagagatgatcatcgatgcgaaaagcggcgtggtccgtaaccccaatctgctggattacaaaatgccgaccatgccggatctgccacaactggaaagcgcgttcgtcgaaatcaatgagccgcaatcagcatacggacataagtcactgggtgagccccccataattcctgtagccgctgctattcgtaacgcggtgaagatggctaccggtgttgcaatcaatacactgccgctaacgccaaaacgattatatgaagaattccatctggcaggattgatttgaggataacatcatgtttgattttgcttcttaccatcgcgcaaccacccttgccgatgccatcaccctgctggctgacaatccgcaggccaaattgcttgccggtggcactgacgtactgatacagcttcaccatcacaatgaccgctatcgccatattgttgatatccacaatctggcagagcttcagggaataacacaggcggaagatggcgcgctgcgaatcggctctgcgacaacatttactcagctcattgaagatcccgtaatccaacgcaatctcccggcgttatgtgctgcggctgcatcaatcgccgggccgcagatccgtaatgtcgccacctacggcggaaatatttgcaacggtgccaccagcgcagattctgccacgccaacgctaatttatgacgcgaaactggagctccactccccacgcggtgttcgtttcgtcccgattaatggctttcacaccgggccgggcaaagtgtctcttgagcatgacgaaatccttgtcgcctttcattttccgccacagccgaaagaacacgcgggcagcgcgcattttaaatatgccatgcgcgacgcaatggatatttcaacaattggctgcgccgcacattgccgactggataacggcaatttcagcgaattacgcctggcatttggtgttgccgcgccaacgccgattcgctgccaacatgccgaacagactgcacaaaatgcgccattaaacctgcaaacgctggaagccatcagcgaatcagtcctgcaagatgtcgccccgcgttcttcatggcgggccagtaaagagtttcgtctgcatctcatccagacgatgaccaaaaaagtgattagcgaagccgtcgccgcggcggggggaaaattgcaatgaatcacagcgaaacaattaccatcgaatgcaccattaacgggatgccttttcagcttcacgccgcgccaggaatgccgctttcggaactactccgagaacaagggcttcttagtgtcaaacaaggttgctgcgtaggcgaatgcggtgcctgtacggtgctggtcgacggcactgcgatagacagttgcttattccttgcgacctgggctgaaggaaaagagatccgcacgctggaaggtgaagcgaaaggcggtaaactttctcatgtccaactggcttatgcgaaatctggtgcagtgcaatgcgggttttgtacgccgggcctgattatggctaccacggcgatgctggcaaaaccacgcgaaaaaccattaaccattacggaaattcgtcgtggactggcgggaaatctttgtcgctgcacggggtatcagatgattgtaaatacagttctggattgcgagaaaacgaagtaaaaggatatccggcctgaattcaggccggattctcagaggttatgtgtttaacaactcatatttcttaatcttgcgatagagcgtagcaatgccgatgcccagttcatcagcaacttccttcttgctgttatgacgtgaaagcgcctcgcggatcatttgcttttccatctcctccagcgccgtgccgcccgcatcatcgagtgacaggtgcgcctcactgacctctgttacatcactttgctccgttgtgccattattcagcagatttggcggcaatagcgtgctgtcgataacttcacctgaaggaacaacgttaaccagatattccatcaaattgcttaactcgcgcaggtttccgggccaacgatgcttacgcaatatttcgacgacatcaggagcaatgccaagataaaccgatcccagacgacgggtatgcagatgtaaaaagtaatgcaccagtaattcaatatcttcctgacgttcacgcagcggtggaagagttatcgggataacattaagtcggtagaagagatcttcgcggaatttaccttcggcaatgaactgggccaaattctgattagttgcagaaatgatgcggatgtcgacttgtattgggctactggcaccaatcggcagaatttcacgcgcctcaatagcgcgcagtaatttagcctgcaacattaatggcatatcaccaatttcatcgagaaacagcgtgcccgtattcgccgcctgaatcaaccctgttttaccgttggcagaagcgccagtaaatgcgcctttaacataaccgaacagttcgctctccagaagctgttccggaatcgcggcacagttgatagcaataaagggtttattccgtcttccgctcaacttatggattgcacgggcgacgacttctttacccgtgccgctttcaccaaccaccataacgctggatgggctgggtgcaatacggctaatgagtcgttttaattgccgcataacacggcactcgccaaccaattgttcaatatgcggttcatcagatgcatttgctacagaaaaactggtatgcgattggtgaaacgccattaaaaatagttgtcggccctggatgttatgcaactgaccaatgattaattcacttttatcatcccacgaaacaatatgttgcatatgaccatgggtaaaattactctcaaatgttaatggtctgaaacgaacaggttttccaataatattattttgtacaacaccgagtgtttttaaagctgtctgattaacaaactgaacccgattatcagcatcaaccactaacacgccctgatccatattatcgatcatggtcgcgaatattttactgatgttatctcctggtccctgatcctccagaagtttagaaacaaaaatggtggatatatggcgaacgtaatcggaaaattcgcgtaaattatcactgatatgttcttgttgctcgtgggtaacggcaatcaaacttatcaccccaacacaacgttcctgtaaaatgacaggcgtacccagaaatgctttttcgcggcaattttctttactatcgcaaccttcacaaaggggatcgaagcgagactgtgtcacaactttttcagttttcgtttccaggacgtggcggagcaggcgtgagttgccgctcaactggcggccaagaaacttcccatacgcgcccgttccggcgacgcgacacaagttttcatcaacgatctcaacctcaagctgcaaaacgctggcaagcattctggcaaaacgctgaattgtcggttgaatttgcatcaatactgactgcgtagtcgcaagctccatagctttaccttccagacttacttaaaagtcgatcattgaagacgttgatggttcacagatcatgatgatattaactcaggcgaaattggctttgataaaaacataagatttttatcactttctaataaaattatggaagagatatcacatttctatatcaatatgagaattacagcggcaagtttatcaaactgaagagagatagcctgcctctttatcttatttctgatacttagcagcaaataaataacgtgataaaaaaagccaaacgttttcgtattttaaaaacaaccggaaactggcatcaatatgtgatcaaccccacacattatccgtcaaattagcctttcgcagccgcgtggataattctggcacacttattgttagtcccaggtatagctgtgaaaacaccaatcactttggcacgtcacagtgaaataaaccactttgcctgtcattccactatcgggactttatgatgaaaactgttaatgagctgattaaggatatcaattcgctgacctctcacctgcatgaaaaagattttttgttaacgtgggaacagacgccagacgaactgaaacaagtactggacgttgccgccgcgttaaaagcactgcgtgctgaaaacatctcaaccaaagtctttaatagtggattaggtatttccgtcttccgcgacaactccacccgtacccgcttctcttatgcttccgcgcttaacctgctcggccttgcacaacaagatcttgacgaaggtaaatcacaaatcgctcacggcgaaaccgtgcgtgaaaccgccaatatgatctccttctgcgctgacgctatcggtattcgcgacgatatgtatctgggcgcaggcaacgcctatatgcgtgaagttggcgctgcacttgatgacggttacaagcagggtgtgctgccgcagcgtccggctttagtgaacctgcaatgcgatattgaccacccgactcaatcaatggctgatctggcatggttacgtgaacactttggttcgctggaaaacctgaaaggcaaaaaaatcgccatgacctgggcctactctccaagctatggcaaaccgctctctgtaccacaaggcatcataggtctgatgacccgcttcggtatggatgtcaccctggcccatccggaaggatacgacctgatcccggatgtcgttgaggttgctaaaaacaatgctaaagcctccggtggtagcttccgtcaggtcaccagcatggaagaagccttcaaagacgcagacatcgtttatccgaagtcatgggcaccttacaaagtgatggaagagcgtactgaattgctgcgtgcgaacgatcacgaaggcttaaaagcactggaaaaacagtgtctggcacagaacgcgcaacacaaagactggcattgtactgaagagatgatggaactgacccgtgatggcgaagccctgtacatgcactgcctgccagctgatatcagcggcgtatcctgcaaagaaggtgaagtgactgaaggcgtattcgaaaaataccgtatcgctacctacaaagaagccagctggaagccttatatcatcgccgcgatgatcctgtcccgtaaatacgccaaaccaggtgcactgctcgagcaactgctgaaagaagcgcaagaacgcgtgaaataacccctcgggccgatcagctggtcggccctctatttccagaggccaaaaggataggatatgtccgttttctcattgaagattgatatcgccgataacaaatttttcaacggcgaaacatcaccgcttttttcgcaaagccaggcaaaactggcacgccagttccaccagaaaattgctggttatcgcccaacaccgctttgtgcgctggacgatctcgcaaacctgtttggtgtaaagaaaattctcgtcaaagacgaatcaaaacgattcggtctgaacgccttcaaaatgctcggcggtgcgtacgccatcgctcaattattgtgtgaaaaatatcatcttgatatcgaaacgctgtcatttgagcacctgaaaaatgccatcggcgaaaaaatgactttcgcgactaccaccgacggcaaccacgggcgcggtgtggcatgggcagcacagcaactcggacagaatgcggtgatttacatgccgaaaggttctgctcaggaacgcgttgacgccattctaaacctcggtgccgagtgcatcgtcacggatatgaactatgacgataccgttcgcctgaccatgcaacacgcgcagcagcacggctgggaagtggtacaggacacggcatgggaaggctacaccaaaatcccaacctggatcatgcaaggctacgcaacactggcggatgaagccgtcgagcaaatgcgtgaaatgggcgtcaccccgacacacgttctgctacaagccggtgtcggtgcaatggccggtggtgtgctgggttatctggtcgacgtctatagcccgcaaaatctgcacagcattattgttgaacctgacaaagctgactgtatttatcgctccggcgtcaaaggcgacatcgtcaacgttggcggtgatatggccaccatcatggcgggcctggcctgcggcgaacctaacccactgggctgggaaatcctacgtaactgcgccacccaattcatctcctgccaggacagcgttgccgcattaggtatgcgcgtgctgggtaatccgtatggcaacgacccgcgcatcatctccggtgaatccggcgctgtcggtttgggcgttctcgcagcggttcattatcacccgcaacgtcaaagcctgatggaaaaactggcgctgaacaaagatgccgtggtgctggttatcagcactgaaggcgacaccgacgtgaagcactaccgcgaagttgtctgggaaggcaaacacgctgtagcaccttaatcaccctattggaactgctccctgcaaaacggggagtaaaaaatctggagaaaaataatggctaagaatattccattcaaactgattcttgaaaaagcaaaagattaccaggcagacatgactcgcttcctgcgcgatatggttgctattcccagtgaaagctgcgacgagaaacgcgtagtacatcgtattaaagaagagatggaaaaagtcggcttcgataaagttgaaatcgacccaatgggcaacgttctcggttatatcggccacggcccgcgtctggtggcaatggacgctcatatcgatacagtcggcattggcaacatcaaaaactgggacttcgatccgtatgaaggcatggaaaccgacgagctgatcggtggtcgtggtacttccgaccaggaaggcggcatggcgtctatggtatatgccggaaaaatcattaaagatctcggtctggaagatgaatataccctgctggtcaccggtactgtgcaggaagaagactgcgacggtctgtgctggcaatacattattgaacaatccggcattcgcccggaatttgtggtcagtaccgaaccaaccgactgccaggtataccgtggtcaacgcggtcgtatggaaattcgcattgatgttcagggtgttagctgccacggttcggcaccagaacgtggtgataacgccattttcaaaatgggtccaattcttggcgaattacaggaactgtctcaacgtctgggctatgacgaattcctcggcaaaggtacgctgactgtttctgaaatcttcttcacctccccaagtcgttgcgctgtagcagacagctgcgcagtttcaatcgaccgtcgtctgacctggggcgaaacctgggaaggcgcgctggacgagatccgcgctctacctgcagtacagaaagctaacgcggttgtttctatgtacaactacgaccgcccgtcctggactggcctggtttacccaaccgaatgctacttcccgacctggaaagtggaagaagatcacttcaccgttaaagcactggtgaatgcttatgaagggctgtttggtaaagcgcctgtcgttgataagtggaccttctcaactaacggcgtatccatcatgggtcgccacggcattccggtcatcggttttggccctggtaaagaacctgaagcgcacgcgccaaacgaaaaaacctggaaatctcacctggtaacttgtgccgctatgtacgctgcaatcccattaagctggctggcaaccgaataattactcttcacttattccccctccggtttaccggagggtttttggagtttgctatgcgcgtattgataaaaaacggcattgttgttaatgcagatggacaggcgaagcaggatttgctgattgaaagcgggattgttcgccagttgggtaccgatatttcgccgcaactcccttgcgaagaaattgatgcctctggctgttacgttttccctggcggcgtggatgtccatacgcatttcaatattgatgtcggcatcgcgcgcagttgtgatgatttttttaccggtacccgcgctgctgcgtgtggcggtacaacaaccattattgaccatatgggatttggcccaaatggctgccggttacgccatcaactggaagtttatcgcggttatgccgcccacaaagcagtcatcgactacagctttcacggtgtcattcaacatattaatcacgctatcctcgacgaaattccgatgatggttgaggaaggactgagcagttttaaactctatttaacctatcaatataaactcaacgatgatgaagtgttgcaggcattacgccgcttgcatgagtccggcgcgctgaccaccgtacacccggaaaatgacgcagctatcgccagcaagcgggcggagtttatcgccgcagggttaaccgcgccgcgttatcatgccttgagtcgacctctggaatgcgaagcggaagccatcgcccgcatgattaacctggcacaaattgccggtaacgccccgctctatatcgtgcacctgtctaacggcttaggtctggattatctgcgtcttgcccgtgcgaatcaccagccagtctgggttgaaacctgcccacaatatctcctgttggacgaacgcagttacgatacagaagatggcatgaagttcattcttagcccaccgctgcgtaacgtacgcgagcaggacaaactgtggtgtggcatcagcgatggtgcgattgacgtggtggcaaccgatcactgcaccttctcgatggctcaacgcctgcaaatttctaaaggcgatttcagccgctgcccaaatggcttacccggtgtggagaaccgcatgcaactgctgttctccagtggcgtgatgacgggacgtatctcaccggagcgttttgttgagttaaccagtgcaatgcccgccaggttgtttggcctgtggccgcaaaaaggattattagcgcccggttccgatggcgacgtggtgattatagacccacgtcagagccaacaaattcagcatcgccatctccacgacaacgctgactactcgccatgggaggggtttacctgtcagggcgcgattgtcagaaccttatcccgtggtgaaacgattttctgcgacggcacctttacaggcaaagccgggcgaggtcgtttcctgcgacgcaaaccgtttgtccctcccgtgctctaaccactgccagggatctatacacaatcaagaatgatgagtgaggaaaaatgagtaagaaaattgttctcgccctgggcgggaatgcgctgggcgatgacctggctgggcaaatgaaagcggtaaaaattacttctcaggcaattgttgatttaattgcccagggacatgaggtcatcgtcactcatggcaacgggccacaggtgggcatgattaaccaggcctttgaagctgcagcaaaaactgaagcgcactcgccaatgctgccgatgtctgtctgtgttgccttaagccagggttatattggttacgatctacaaaacgccttaagagaagaactgctttctcgtggcattaataaacctgtagcaacgctggttacccaggtcgaagtcgatgctaacgatccggcattcctcaacccgaccaagccgatcggttcgttctttaccgagcaagaagcagagctactgacaaaacagggttacactctgaaagaagatgcgggtcgcggctatcgtcgtgtcgttgcttcgccaaaaccggttgatatcattgaaaaagaaacggttaaagctctggtagatgccggacaggtggtgatcaccgttggcggtggtggtatccctgttattcgtgaaggtaaccatctgcgtggtgccagcgcggttatcgataaagactgggccagcgcccgtttagcagaaatgatcgatgccgatatgctgatcattctgactgcggtagaaaaagtggccattaacttcggaaaagagaatgaacagtggctcgatcgcctgtcgttaagtgatgctgaacgctttatcgaagaaggtcattttgcgaaaggttctatgctgcctaaagtggaagctgccgcctcgtttgctcgctctcgcgcaggtcgtgaagcactgattaccgtattgagcaaagcgaaagaagggattgaaggcaaaaccggaacggtgatttgtcagtaatttaaaggccggatgggtaataccatccggccattttcatttaagccacttccagcacttcttttgtcgctttaacgccctgatgcatcaacatcattaacgcctcaagtacgccgccgccaatcgcccgggctttatcagaaacgctggtgaaatcagccgtttcaccacgaggatcgatatcaccaattttaaaaccaccgaccacggccagtccgtcgttcaacaagccacgcaccatccccgtcaacggtgctttaatttcatgctcaccaatccaggcaatgacatcgccctctttcaccagatcgcctaatttcacgttggatcgcataatgcctgcaacaggagcacggatcactcgtcgggtggtatgccccataatattgccgggaacaccggtattctcctgcgcacaacctgagtaaatcacctgaccgagccagtgcccgcgatttgtttcaattaccgcatgacaatccttccctgcagtaaagcccggcccaagcgcgattgttactggtgccatatctgcccgcgttcccaaattctgtttcgccagaatagcgtccaccacgcaaagcggtttcagttcatcaagcaatgaacaggtgggatctaccatcacagggataaatccgcgttcggtaagtttcatcgcttccgcagagctggttgccaggcgggcggtgacgccttcgaccgtcatttcgccatcgaacacggcctgggcaaacgccacggtacaacgaatcactgtcggtttttccacttccaacatgatcactttaaaacccgcatgatacagacgtagcgctacaccactggcgatatcccccgcaccgcgaatcaccaccagctggtgtccggaaggatgagaaggcttcatcatcaacccacccggcgcgttatttttcacctgtaatatttctgccagcacgctaatggcgatctcctgcggcgtttccgcacctatgttgtaaccaacgggcgcatgtaaacgggcaatatgttcttcagccacgcctttctcacgcaattggcgcaggaaaagctgaaccttgcggcgacttgccagcaaccccagccatgcaatgggttgttcaatgagtttgtcgagggcttcacgatcctgattattcgtggcaatcaggacaaaattatcagggcgaatatccagtgcttccactgccgcaccaaacgactcagcatggagaagcgtggttgatggtgggaatagttcaggattgaggctttcgcgataaatatcagcaacggcgatatcaaatcctaatagcgccgcactctgggctatcgcccggttgacatgccccgcaccaatcaacaccagacgtggacgcataccatggacgctgataaatactgacattgcacctccacaatctgacccgacagcatccgcaccgttacgagccatacgtccatggaataatcgcggcttacgttcctgcaatgcctgaagcgactcttcaatcaccttccgttcaaccattccgccaccaattgtaccgacgatagaaccatcggcgcgcactaacatttgtgcagaatggcggggggttgagcctcggctatcaacaatttgcgccatcgcaaacggacaattttgctcttcgagttttgcagcctctgtgaaaatattcataccaacctcaatggatatcctttcagtaacccggaatacccgggccgctaattcacaaatctgcgcgcgattgcaggatgttcttgtatatcgcccagccagattgcctctacgttgtgttgttgcagcggttgaaggagctcgctttgcgcaatcgcattctcacattgagaaaaacggttaatgaaccagactcgccgacaaccttgcggtacgtttttaaacgccccctgagggtggcgaaccagcgcaacgagatcgctcagttgcaagggtgcatcaggtgttaacccagtaatatcagcaaactgcgaccagcgatggacattttctgtgctcactttcgcacccaaaatatgtcctcccatcacagcaatcacgcagcaactgcttttaggtatgcaaggttcgtgctcatcaggcgcttttaacggcattccacgcgagccatctgcctcaatgagaattacgtcacactctggtcgttgtaccagtgcatcaatcgcttctggcgtaaatccctgcacttttccctggttcgctttccagcagtgaaaacaaaatgaaatgggggatataaaagacgcatgaggaagcatggcgggatcacgacagaaaaccacgggccagtgagatgttggcataaacatatgtgtcgtcgtagtgattaatacacgcctgccactcgcctggaacagttctgccagccaaaaaagcaagctggttttccccccagcaccaacaatagaaatcacagtgggacgtttctgcgcgcctaaatcaatgaataatgccgatgggtcaattatacttttcacgcgtctttatggacctctctgggataaattaccctcaacgtaatccatcaggaagtaacgcaattatcaggcgttattagctcctgtaaataatggaatcactatgtcagccatcgactgtataattaccgccgcaggattatcatcaagaatggggcaatggaaaatgatgttaccctggcaacagggaacaattcttgatacaagtatcaaaaatgcgttgcagttttgtagccgaattattttagtcaccggctatcgtggtaatgaactgcacgaacgttatgcgaaccagagcaatatcactattatccacaacccagattatgcgcagggtttactgacatcagtaaaggccgcagtacccgcggtgcaaacagaacattgttttctcacccacggagatatgccaaccctcaccatcgatatttttagaaaaatctggtcgttacgaaatgatggcgcaatactgccactccataatggcatccccggccatccgattttagtgtcaaaaccatgcctgatgcaggcaatccagcgacccaatgtcaccaatatgcgtcaggcactccttatgggagaacattattccgtcgaaatagaaaatgcagaaataattttagatattgatactccggacgactttattacagcgaagaaaaggtatactgaaatttagaaaacgtagctaaacgattgcgttcaaatatctaatccctccagcactctttatcataatgataaggaatcactgattttgagaaaagagaaaaagtgataaatgggctggcaataataattttcaggagtgattttaattctcatttggcacctgtgagttcattcacaaaaagccattaagtttcgagccgcctcacatttttttatatttcccgccaaacctggcaagagtggtgcgattgttgctctatccccctaaaccaccggatttctcaacaccggtcactcaatgatatctgtataagctaaggagagggttatgggggatattatgcgtcccattccgtttgaggaacttttgacgcgcatatttgatgaataccaacaacaacgctcaatctttggtattcccgagcaacagttttactcacccgtaaaaggtaaaactgttagcgtcttcggtgaaacctgtgccactcccgtcggccctgccgctggcccgcacacgcaacttgcgcaaaacatcgtcacctcctggctgactggcggacgcttcatcgaactaaaaaccgtccaaattcttgaccgcctggagctggaaaagccctgtatcgatgccgaagacgagtgctttaacaccgaatggtctaccgaatttaccctgcttaaagcctgggatgaatacctcaaagcctggtttgccctgcaccttctcgaagcgatgttccagccttctgattccggtaaatcgttcatctttaatatgagcgtcggttacaacctcgaaggtattaagcaaccgccgatgcagcagttcatcgacaatatgatggacgcatctgaccatccgaaattcgctcaataccgcgatgcacttaataagctactccagaatgaggcatttttagcccgccacggattgcaggaaaaacgcgaaagcttgcaagccttacccgctcgcatccccaccagcatggtacaaggggttaccctctccaccatgcacggctgtcctccgcatgaaatcgaagccatttgccgctacatgctggaagaaaaagggctcaacacctttgtgaaactcaacccgaccttactggggtacgcgcgtgttcgtgagatcctcgatgtctgcggtttcggttacatcggcttaaaagaagagtcatttgatcacgacctcaagctgacgcaagcgctggaaatgctggaacgcctgatggcactggcaaaagaaaaatcactcggctttggcgtaaaactgactaacactctcggcaccattaataacaaaggcgcactgcctggtgaagagatgtatatgtcaggccgtgcgctgttcccgctctccatcaacgttgcagcagttctctctcgcgcctttgacggcaaactgcccatttcttattccggtggtgccagtcagctgactatccgcgatatttttgatactggtattcgccctattactatggcaaccgacctgctgaaacctggcggctatctgcgcttaagtgcctgcatgcgcgagctggaaggctccgacgcctggggacttgaccatgttgacgtcgaacgactgaacagactggcagcagacgcgttaaccatggaatacacccagaaacactggaagccagaagagcgtattgaagtggctgaagacctgccgctgaccgattgctacgttgccccctgtgttactgcctgcgctatcaagcaagatattccggaatacatccgtctgcttggcgaacaccgctatgccgacgcgctggaactcatctatcaacgcaacgccctgcccgccattaccggtcatatttgcgatcaccagtgccaatacaactgtacccgcctggattacgacagtgcgctgaatatccgcgaactgaaaaaagtcgcgctggaaaaaggttgggaggaatataagcaacgctggcacaaaccagccggttctggttcacgccatccggttgccgtgattggtgcaggtccggcgggtctggccgcaggttacttccttgccagagcgggccatccggttacgctgtttgaacgcgaagccaatgcgggcggcgtggtgaaaaatatcattcctcagttccgtattcctgcagagttaattcagcacgatatcgattttgttgccgatcacggcgtgaaatttgagtacggttgctcacccgatttgaccgttgaacagttaaaaaatcagggcttccactatgttctgattgccaccggtaccgataaaaatagcggtgtgaaactggcgggcgacaaccaaaatgtctggaaatcactccccttcctgcgtgaatacaacaagggcaccacactcaagctgggcaaacatgtggtcgttgtcggggcgggtaacaccgcaatggactgcgctcgtgcggcgttacgcgttccaggcgtagaaaaagcaacggtcgtttaccgtcgttcactgcaagagatgccagcatggcgcgaagagtatgaagaagcgttgcacgacggcgtggagttccgtttcctgaataatccggaacgtttcgatgctgatggcaccttaaccttgcgcgttatgtcgcttggcgaacctgatgagaaaggtcgtcgtcgtccggttgaaaccaacgaaacagtaacactgcatgtagacagcctgatcaccgccattggtgaacagcaggatactgaagccctgaatgcgatgggcgtgccgctggacaaaaacggctggccagacgtcgaccataatggcgaaacgcgtctgagtgacgtctttatgatcggcgacgtacagcgcggaccatcctccattgtcgctgctgtcggaaccgcgcgtcgggcgaccgatgccatcctgagtcgggaaaatatccgttcccaccagaacgataaatactggaataacgtcaatccggcggaaatctatcaacgtaaaggcgatatctctgtcactctggtgaacagtgacgatcgtgatgcgtttgtcgcgcaggaagccgctcgctgccttgaatgtaactacgtttgcagcaagtgtgtggatgtctgcccgaaccgcgccaacgtatccattacggtcccaggcttccagaaccgtttccagacgctgcacctcgacgcttactgtaacgaatgtggcaactgcgcccaattctgcccgtggaacggtaaaccgtacaaagacaaaatcaccgtcttcagcctgtcgcaagactttgataacagcagcaacccaggcttccttgtggaagattgccgggtacgcgtacgtctgaataaccaaagctgggtgttaaacatcgacagcgaaggtcagttcaacaacgtaccaccggagctgaacgatatgtgccgtatcatcagccatgtccaccagcatcatcattatctgctgggccgcgtggaggtgtaatcatgttgattctgaagaatgtcaccgcagtgcagttacacccggcgaaagtgcaggaaggcgttgatatcgccatcgaaaatgatgtgattgtcgctatcggcgatgccctgacgcaacgctaccccgatgccagctacaaagagatgcatggtcggattgtgatgccgggaattgtctgctcgcataaccatttttactcggggctttcccgcggaattatggcaaacatcgccccctgcccggatttcatctcaacgctgaaaaatctctggtggcggctcgatcgcgcccttgatgaagagtcgctctattacagcggactgatttgttccctggaagcgattaagagcggatgtacatcggttatcgatcaccatgcctctccagcctatatcggcgggtcgctctccacattgcgcgacgcatttttaaaagttggcctgcgcgcgatgacctgttttgaaactactgaccgtaacagcggcatcaaagagttgcaggaaggtgtagaagaaaacatccgcttcgcccgtcagattgatgaggcgaagaaagcagcaaccgagccgtatctggtggaagcacatatcggcgctcacgcgccgtttaccgtaccggatgccggtctggagatgctgcgtgaagccgtgaaaagcacaggtcgtggtttgcatattcacgctgcggaagacctttacgacgtttcctacagtcaccattggtacggcaaagacctgctggcacgactggcgcaattcgatctcatcgacagcaaaacgctggtcgctcatgggctgtacttgtcgaaagatgacatcgccctactcaatcagcgcgatgcgttcctggtgcataacgcccgttcaaacatgaacaaccatgtcggctacaaccatcaccttagcgacatccgcaatctggcgttgggaacggacggcattggttcggacatgtttgaagagatgaaatttgccttctttaaacatcgcgatgcgggtggcccgctgtggcctgacagttttgccaaagcactggctaacggcaacgaactgatgagccgcaactttggcgcgaaatttgggcttctggaagccggttacaaagccgatttaaccatttgcgattacaactcgccaacgccgctgctggcagacaatatcgccgggcatatcgctttcggtatgggctcaggcagcgttcacagcgtgatggtcaatggtgtgatggtctatgaagaccgtcagtttaacttcgattgcgattccatttatgcgcaagccagaaaagccgctgccagtatgtggcgtcggatggatgcgctggcataaataacagctcccctcttctttcagagaagaggggaaattaaggaaagacgatgattgaacaatttttcagacccgactctgtcgaacaagcgctggaactgaagcgccgctaccaggatgaagccgtctggttcgccgggggcagcaaactcaacgctacaccaacccgtaccgataaaaagattgccatttccttgcaggatctggagctggactggattgactgggataacggtgcactacgaattggcgcaatgtctcgcttgcagtcactgcgtgatgcacgatttattcctgcagcactgcgtgaagctctcggttttgtttactcacgccatgttcgtaatcagtcgaccattggtggtgaaatcgccgcccggcaggaagagtcggtgctgcttcccgtcctgctggcactggatgctgaactggtttttggcaacggcgaaacgctgtcaatcgaggactacctggcctgcccatgcgatcgcctgttaaccgaaattatcattaaagatccgtatcgtacctgtgcgacccgcaaaattagccgttctcaggcaggtttaaccgtcgtgacggcagccgttgcaatgacagaccacgacggtatgcgaattgcgctggatggcgtcgccagtaaagcactgcgtctgcacgatgtcgaaaaacaaaatctggaaggcaatgcacttgaacaggctgtcgccaacgccattttcccgcaggaagatttgcggggcagcgtggcctataaacgctatatcacgggagttctggtagccgacctgtatgccgactgccaacaggctggggaggaagccgtatgatcatccactttactttaaatggcgcgcctcaggagctaaccgttaatccaggcgaaaacgtgcaaaagctgttgtttaacatgggaatgcactctgtacgcaacagcgatgatggattcgggtttgccggttctgacgcgattatctttaacggtaatatcgttaacgcgtccttgcttatcgccgcacagttagagaaggcagatattcgtaccgcagaatctctgggcaaatggaatgagttaagtctggttcaacaggccatggttgatgttggcgtggtgcagtctggttataacgatccagctgcggctctgattatcaccgatcttctcgatcgcatcgacgcacctacccgcgaagagatcgacgacgcgctctcaggtctgtttagccgcgatgcaggctggcagcaatactatcaggtcattgaactggcggttgcacgtaaaaataatccgcaggccaccattgatatcgctccgactttccgtgacgaccttgaagtcattggcaagcattatcctaaaactgatgccgcgaaaatggtgcaggcgaaaccctgctatgttgaagatcgcgtaacggctgacgcctgcgtcattaaaatgttacgtagcccacacgctcacgcactgattactcatctggatgtcagcaaagctgaagccttaccgggcgtcgttcacgttattactcacctgaattgcccggatatttactataccccgggtggtcagagcgcaccggaaccatcaccgcttgaccgccgtatgttcggcaagaaaatgcgtcacgtcggcgatcgcgttgctgcggtagtagccgaaagtgaagacattgcgctcgaagcactgaagctcatcgacgttgaatatgaagtgcttaagccggtaatgtcgattgacgaggcaatggcggaagatgcgcctgtcgtgcacgatgaaccggtggtgtatgttgctggtgcgccagatactctggaagatgataacagccatgcagcccagcgcggcgagcatatgatcatcaacttcccgatcggttctcgcccacgcaaaaatatcgctgccagtattcatggtcatattggcgatatggacaaaggctttgccgatgccgatgtgatcattgagcgaacctataactcaacgcaggcgcagcagtgcccgactgaaacacatatctgctttacccgtatggacggcgatcgtctggtgatccacgcctccacccaggtaccatggcacttacgccgccaggtcgcgcgcctcgtgggcatgaaacaacataaagttcatgtcattaaagaacgtgtaggcggcggttttggctctaaacaggacatcctgctggaagaagtgtgcgcttgggcaacttgcgtaaccgggcgtccggtacttttccgctacacccgtgaagaagagtttattgctaacacctctcgtcacgtagcgaaagtcaccgtcaaactgggcgcgaaaaaagatggtcgcctgacggcagtgaagatggatttccgcgccaacacgggtccttacggtaaccactcactcaccgtaccgtgtaacggaccggcgctgtcgctgccgttatatccatgcgataacgtcgatttccaggtcaccacctactacagcaacatttgcccaaatggtgcttatcagggttatggcgcaccgaaaggtaacttcgctatcaccatggcgttagcggaactggctgaacagttacagatcgaccaactggaaattatcgaacgtaaccgggtacacgaagggcaagagctgaaaattctcggtgcaatcggtgaaggtaaagcgccgacctccgttccttccgccgccagctgcgcactggaagagatcctgcgtcagggtcgcgagatgatccaatggtcttcaccaaaaccacaaaacggtgactggcacatcggtcgtggcgtcgccattatcatgcagaaatcgggtatcccggatatcgatcaggctaactgcatgatcaaactggaatcagacggtacctttatcgttcattctggcggtgcggatattggtactggtttggatactgtggtgacgaaactggcagcagaagtgctgcactgccccccgcaggacgtgcatgttatctccggtgataccgatcatgcgttgtttgataaaggcgcatatgcctcgtccggtacttgcttctcgggtaacgctgcgcgtttggcagcggaaaatctgcgggagaaaatcctgttccacggcgcgcaaatgttgggtgagccagtggcagatgttcaactagcaacgccgggcgtcgttcgcggcaagaaaggcgaagttagtttcggagagatagcccataaaggcgaaaccggcaccggctttggttcactggtgggaactggcagttatatcacgcctgatttcgccttcccgtatggcgcaaacttcgctgaagttgccgtcaacacgcgtacgggtgaaatccgcctggataaattctacgccttgctggactgcggtacaccggtcaatccagagttagcgctgggacaaatctacggtgccaccctgcgtgctatcggccacagtatgagcgaagagatcatttatgacgccgaaggtcacccgttaacgcgtgatttacgcagttacggcgcaccgaaaattggtgacattccgcgtgatttccgcgctgtgctggtgccgagcgacgataaagtcggcccattcggggcgaaatcgatctcggaaatcggtgtaaatggcgccgctccggcgattgctaccgcaattcacgatgcctgcggcatctggttacgcgaatggcatttcacaccggagaaaatactcaccgcgctggaaaaaatataagtaataaatggccgcttcggcggcctgtttctctgtttgaacgatgactaaatagtgactgcgaaaatgagataagccgttctcaaggcgtcctgcgccccaaattcgtgggaatttattttactaattcagatgatcaaatttactttaaaaggagtgaagggatgtctgatataaaccatgcaggttctgaccttatatttgaactggaggatcgccctccctttcatcaggctctcgtaggtgccattacccatctgttggcaattttcgttccgatggtaacccccgcgttaatcgtgggtgcggccttacagctttccgctgaaacaactgcctatcttgtttctatggcgatgatcgcctctggtattggtacctggttacaagtaaaccgctacggcatcgtcggttctggtttactttcaattcagtcagtcaatttttcatttgttacggtcatgattgcgctgggtagcagcatgaaaagcgacggttttcacgaagagttaatcatgtcgtcgctcctcggcgtctctttcgttggcgcatttctggttgtcggctcttcttttatcctgccctatttacgtcgggttattacgcctaccgtcagcggcattgtggtgctgatgatcggcttaagcctgattaaagtcggcattattgattttggtggaggatttgcagccaaaagcagcggtacgttcggcaattacgaacatctcggcgttggtttattggttttgattgtggtgatcggctttaactgctgtcgcagtccgttgctacgcatgggagggatcgccattgggctatgtgtcggctatatcgcatcgttatgcctgggcatggtggatttcagcagtatgcgcaatttgccgttaatcaccatcccgcatccgttcaaatacggctttagttttagcttccatcagttcctggtggttggcacgatttatctgcttagcgtgctggaagctgtcggcgatatcaccgccacggcaatggtttcccgccgtcccattcagggggaagagtatcagtcccgactgaaaggcggcgtgctggcagatggtctggtttctgttatcgcctccgctgtcggttcattaccattaaccacgtttgcgcaaaataatggggttattcagatgactggcgtcgcttcacgttatgtcgggcgaaccatcgcggtaatgctggttatcctcggcttatttccgatgattggcggcttcttcacgaccattccctcagcagttctgggaggcgcaatgacgttgatgttttccatgattgccatcgcagggattcgcatcatcatcaccaacggtttaaagcgccgagaaacacttattgtcgccacgtctttaggtttagggcttggcgtctcctacgatcccgaaatttttaaaatattgccagcctctatttatgtattagttgaaaaccctatttgtgctggcgggttaactgcgattttattaaatattatcctccctggtggctaccgacaggaaaacgttctgcctggtattacctcagcggaagagatggattaacagtaaaggagtcaatgatgtcaggagaacacacgttaaaagcggtacgaggcagttttattgatgtcacccgtacggtcgataacccggaagaaattgcctctgcgctgcggtttattgaggatggtttattactcattaaacagggaaaagtggaatggtttggcgaatgggaagacggaaagcatcaaattcctgacaccattcgcgtgcgcgactatcgcggcaaactgatagtaccgggctttgtcgatacacatatccattatccgcaaagtgaaatggtgggggcctatggtgaacaattgctggagtggttgaataaacacaccttccctactgaacgtcgttatgaggatttagagtacgcccgcgagatgtcggcgttcttcatcaagcagcttttacgtaacggaaccaccacggcgctggtgtttggcactgttcatccacaatccgttgatgcgctgtttgaagccgccagtcatatcaatatgcgtatgattgccggtaaagtgatgatggaccgaaacgcaccggattatctgctcgacactgccgaaagcagctatcaccaaagcaaagaactgattgaacgctggcacaaaaatggtcgtctgttgtatgcgattacgccacgcttcgcccctacctcatctcctgaacagatggcgatggcgcaacgcctgaaagaagaatatccggatacatgggtacatacccatctctgtgaaaacaaagatgaaattgcctgggtgaaattgctttatcctgaccatgatggttatcttgatgtttaccatcagtacggcctgaccggtaaaaattgtgtctttgctcactgcgtccatctcgaagaaaaagagtgggatcgtctcagcgaaaccaaatccagcattgctttctgtccgacctccaacctttacctcggcagcggcttattcaacttgaaaaaagcatggcagaagaaagtcaaagtgggcatgggaacagatatcggtgccggaacaacttttaacatgctgcaaacgctgaacgaagcctacaaggtattgcaattacaaggctatcgcctctcggcatatgaagcgttttacctggccacgctcggcggagcgaaatctctgggccttgacgatttgattggcaactttttacctggcaaagaggctgatttcgtggtgatggaacccactgccactccgctacagcagctgcgctatgacaactctgtttctttagtcgacaaattgttcgtgatgatgacgttgggcgatgaccgttcgatctaccgcacctacgttgatggtcgtctggtgtacgaacgcaactaataataaaactttaacatcctcgtgaggacatcattatgtctggagacatcctacaaacaccggacgcaccaaagccacagggcgcgctggataattattttaaaattaccgctcgtggcagtaccgttcgtcaggaagtactggctggcttaacgacctttctggccatggtttattccgttatcgtcgttccgggaatgctgggcaaagcaggttttcctcccgcagctgtgtttgttgccacctgtctggtcgcgggcttcggctcgttgctgatggggttatgggccaatttgccaatggcgattggttgcgctatttccttgacggcgtttaccgcattcagtctggtactcgggcaacaaattagcgttcctgtcgcactgggcgcagtctttctgatgggcgtcatcttcaccgctatttccgtaaccggtgtgcgtacctggatcttacgtaatttgccgatggggatcgctcacggtacaggtatcggtatcggcctgtttctgctgctgattgctgctaacggtgtgggaatggttatcaaaaacccgattgaaggcttgccagtggcgctcggtgcctttacctccttcccggtgatgatgagcttactggggctggcggtcatcttcggtctggaaaagtgccgcgtacccggcgggatcttgttggtgattattgcaatttcgatcatcggcttaatctttgacccagcggtgaagtaccacggtctggtggcgatgccaagcctgactggcgaagatggtaagtctctgattttcagcctcgatattatgggcgcactccagccaactgtacttccgagtgtactggcattggtgatgaccgcagtgttcgacgccactggcaccatccgtgccgtcgccggtcaggcgaatttgttggataaagacaaccagatcatcaacggcggcaaagccctgaccagtgactcagtaagttcaatattctccggcctggtgggcgcagcgcccgcggcggtttatatcgaatcagcggcaggaaccgccgccggggggaaaaccggtttaaccgcaaccgtggttggtgtgttgttcctgatgattctgtttttatcaccgttatcgtttctgatccccggttatgccacagctcccgcactgatgtacgtgggtttgctgatgttaagcaacgtctcgaagctggatttcaacgattttattgacgcaatggctggcctggtgtgtgccgtgttcatcgttctgacttgtaatatcgttaccggtattatgctgggctttgtaacactggtggtgggtcgcgtctttgcgcgcgaatggcaaaagctgaatattggtacggtgatcattactgccgcactggtcgcgttttacgcgggtggttgggcaatctaatagattctccgcgcctttcagcgcggagatttctttcacagaggattctcactgctggcaacaatacgctgctggcggactcgcctgagttctctttcagtcagcaactgcagcgcctgtgtcgggcaagattcaacgcaggctggcccctcttcccgctgttcacagagatcgcatttcacgatttgttgccgggtatcccccggcaatgactgaatggtgatcattccaaacgggcacgcactgacgcaactctgacagccaatacaacgggcagaatttgcctgcaccacctgctcgcccatcgtcagcgcccccacgggacaagcgccaacacaaggggcgttttcacactgatggcacatcaccggcgcactgatgctatccagccgttgtaccttcagccggggtaaaaagatatcggcattcaactcctgttctgaagggtgagcgaccacacaggccacttcacaagtacggcagccaatacagtcagccggattaacgataattaacgatttcatcacgatgccttcgtatcaaacagagttaacatatcgcgcgccgcctgccttcctgcggccattgcagtgacaaccagatctgcgccatgaactgcatcaccaccagcaaagacttttttcagatgcgtctgggtgggtaaatacccgacgtcgccggtttgaatcaggccccatttatcgagtttaattccgctgccctgcaaccacggcatggtatgtgcctggaaaccaaaggccataatgagaacatcggcgggcaattcaaactctgaacccgcaaccggacgaggacgacggcggccatccggccccggctcacccatagcggtacgaatcaggcccaccgccgttaagcgtccatcttcatcacaagcgatatattgcggctgaacattgaactgaaactcaacaccttcctcgcgggcattgaccacctctttgcgcgaacccggcatactgacttcatcacgacgatacgcacaggtcacgctggcagcattaaggcggatggaagtccgcaaacaatccattgtcgtatcgccaccgcccaataccacaactcgcttaccttccacatccgtcagcggatactctgcagactccggcaatcccatgagctggcgggtatgggcggtcaggaacggtaacgcctgaatgacaccaggcgcatcttcatgcggcagatctgctcgcatcatcccgtaagtccccacgccgaggaaaacagcatcatattccgccgttaattcgttgaaagagatatcgcggccaatttcacagttgagatggaaatcgattcccattgcggtgaatatctctcgccgctggcttaataccgttttatcgagtttgaaaggaggaatgccaaaagtcagcataccgccaatttctggatggcgatcaaagacatcaacctgaactcccgcgcgcgccagaatatcagcacaccctaatcctgcaggtccagcgccaatcaccgccactttttcgctacggggaacaactttgctgacatcgggacgccagcccatcgccagcgcagtatcggtgatgtagcgttccagattaccgatagagactgcgccagagtgatctttcaaagtacatgcaccttcacaaagacggtcctgtggacataccctgccgcagatttcgggtaaggaactggtctggtggcaaagttctgccgcttcaataatctttccttcctgtaccagacggatgtaatccggaatagcgttatgcagcggacaatgccagttgcagttagctttttcggcacaataaacacagcggtcactctcataagtcgcttgttgtggatccagcccgcaatagatttcgccaaagtgggttttccgttcactcgctgaaattttatctgcgcctttacgcgagttaacggggagcaacgctgcactgcgagatggctgagcgtctgatgacgcttttcctgctgccgttttgcgctggcgggccacctttatctgctgcaaccctttatcgtccatcagccgtaacgcctgtgttgggcagacgtcaatacaggcttgcgtgccggaactgcgctggttacaaaggtcgcatttctgtgcaatcgtatcgaccatctcaacgacgccaaaggggcaagcgattgcgcatcttttacaaccaatacatttttgctcgtccagttgtacgctatcggactggaaagtcagagcattaaccggacaagccgtaacgcaaggggcattgttgcagtgatggcaggccaccggattcgcagcctggcctttccctacaacgtggatacgcggtcgaaagtcactgtgactcagcggccagttttcttgattatgtgccaccgcacaggcaatttcacaagcatggcagcctatacattccgcagcttcagcagcgataaacttattcatttgcatccctttcatttaatgagttatgtcttctcaaatttcgcgatgcaataaacgggcatatattaggtagcatgaccgttttaattataattttgcaactgagttcaaattattgcccctcaatctatgccgctttcattatttcaacattgccgatcaaaagaatgctatccagataaaaacgattaaatgcgagagtgcgacatgccagaatgattaatgaaatatcaatatgagaaaattacagataattccattgtcaggttctcttctcattttcgtggtttaaccacgattatgtgattgcctccgcaattcctgtctctaactccccttcctcgcaaaaactggcactccacgagcatgtgtttagacagtttcatgaacataaacggttgctttttactctggcgggcgaaaggagaaacactgatgagcgccatagattcccaacttccctcatcttctgggcaagaccgcccaactgatgaggttgaccgcatattatcaccaggaaagctgatcatactcggtctgcaacacgtccttgtcatgtacgcaggtgcagtcgctgttcctcttatgattggtgaccgactcggcctatcaaaagaagctattgcgatgctcattagctcggatctcttttgctgcgggatcgtcacattattgcaatgtatcggtatcggccgctttatggggatccgcctgccggtgattatgtcggtgaccttcgccgctgtaacaccaatgatagctattggtatgaacccggatatcggcctgctggggatattcggtgccactatcgccgcgggttttatcaccacattattagcgccacttatcggtcgcttgatgcctttattcccgccactggttaccggtgtggtgattacttctatcgggcttagcatcattcaggtgggtattgactgggccgccggaggtaaagggaatccgcaatatggtaatcccgtttatttaggtatctcctttgccgtcttaatttttatcttgctcattactcgctatgcgaaaggatttatgtccaacgtcgccgtattactggggattgtatttggctttttactttcgtggatgatgaatgaagtcaatttatccgggctacatgatgcttcatggtttgcgattgtcacgccgatgtcatttggtatgccgattttcgatcccgtttccattctgaccatgactgccgtgttaatcatcgtgtttatcgagtcgatggggatgttcctggcactgggtgaaatagtcggtcgtaaactctcttcacacgatattattcgcgggctgcgtgtcgatggtgtagggacaatgataggcggaacgtttaacagcttcccccacacgtcattttctcaaaacgttggcctggttagcgtgacgcgcgttcatagccgctgggtgtgcattgcttccggtatcattttgatcctgttcggcatggtgcccaaaatggcggtgctggtggcctcgattccgcaatttgtgctgggcggcgcggggctggtgatgttcggcatggtactggcgacagggattcgaattctgtcgcgctgtaactacaccactaaccgttacaacctctatattgtggcgatcagtctcggtgttggcatgacgccaacgctctctcacgatttcttttctaagttaccggccgtactgcaaccgttgctgcatagcggcattatgctcgcaacccttagcgccgttgtgctgaacgtcttctttaatggctaccagcatcatgctgacctggtgaaggaatccgtctctgataaagatttaaaagtcaggacagtacgtatgtggcttctgatgcgcaagctgaagaaaaatgagcatggagaataatatgaatcttttaatgcgcgctatattcagtctgctgttgctttttactctctctattcctgtcatttctgattgtgttgcaatggccattgaaagtcgcttcaaatatatgatgctgcttttttaaatggtttttacctgtcgacatccgctcaaaacgggcggttgtcgataaacgctcacttggttaatcatttcactcttctattatctataatgatgagtgatcagaattacatgtgagaaattatgcaaacggaacacgtcattttattgaatgcacagggagttcccacgggtacgctggaaaagtatgccgcacacacggcagacaccctcttacatctcgcgttttccagttggctgtttaatgccaaagggcaattattagttacccgccgcgcccttagcaaaaaagcatggcctggcgtgtggactaactcggtttgtgggcacccacaactgggagaaagcaacgaagaggcggtgatccgccgttgccgttatgagcttggcgtagaaattacgcctcctgaatctatctatcctgactttcgctatcgcgccaccgatccgaatggcattgtggaaaatgaagtgtgtccggtatttgccgcacgcaccaccagtgcgttacagatcaacgatgatgaagtgatggattatcaatggtgtgatttagcagatgtattacgcggtattgatgccacgccgtgggcattcagtccgtggatggtgatgcaggcgacaaatcgcgaagccagaaaacgattatctgcatttacccagcttaaataaaaaacccaataaaaaaccccgacatttgccggggttgtgagcataaataaaaaaccccgacatttgccggggttgtgagcataacgtaatgcttatttcaccggacgcatcgccgggaacagaataacgtcgcggatggtatggctgttggtgaacagcattaccatacggtcgataccaattcccagaccggctgtcggtggtaagccatgttccagtgcggtgacataatcttcgtcgtagaacatcgcttcgtcgtcacctgcatctttcgcggcaacctgatccaggaagcgctgcgcctgatcttccgcgtcattcagttcgctaaagccgttaccgatttcacgcccaccaatgaagaactcaaagcggtctgtgatttccgggttaacgtcgttacgacgcgccagaggagaaacttctgccggatattcagtaatgaaggtcggctggatcagatgtgcttctgccacttcttcgaagatctcggtaacgatacggcccagaccccagcttttctcaacgtggatgccgatagattcagcaatcgctttcgcagagtcgaagttgtccagatccgccatgtcagtttccgggcgatatttcttgatcgcttcacgcatggtcagtttttcgaacggtttaccgaagtccagcgttacgtcgccgtaggtcacttccgtcttaccgagaatatcctgtgccagagtacggaacagcgattcggtcagctcgataagatctttgtaatctgcgtaagccatatagagttccatcatggtgaactctgggttatgacgtacggaaataccttcgttacggaagttacggttgatttcgaatacacgctcgaagccaccgaccaccagacgcttgaggtacagttccggcgcgatacgcaggtacatgtcgagatccagcgcgttatggtgagtgataaacggacgcgcagcggcaccgccagggatcacctgcatcatcggcgtttcaacttccataaagccgcggttcaccatgaactggcgaataccagagaggatctgcgagcgcactttaaaggtgttgcgggattcatcgttagagatgagatccagataacgctgacgatagcgcgcttcctgatcctgcaagccgtggaatttatccggcagcggacgcagtgctttggtcagcagacgcagctcggtacagtggatagacagttcgccggttttggttttgaacagtttacctttcgcgccgaggatatcgccgaggtcccattttttgaactgctcgttgtaaacgccttccggcagatcgtcacgggcaacgtacaactgaatgcgaccgccaacgtcctgcagggtaacgaaagacgctttacccataatacgacgggtcatcatgcggccagcaacggcgacttcgatgttcagcgcttccagttcttcgttctctttaccgtcgaattctgcgtgcaattggtcagaggtatgatcgcgacggaaatcgttcgggaaggcaatcccctgctcacgcaggttcgccagcttctcacgacgcgttttcagttcattgttaagatcgactaccgcgtcagcgccctgtgcgtgttgttcagacatgttggttcctcataaccctgctttcaaacttgcttcgataaattgatccaggctgccgtccagcacggcctgcgtgttgcgggtttctaccccggtacgcagatctttaatgcgggagtcatcaaggacataagaacgaatctggctgccccagccgatgtcggatttattgtcttccatcgcctgtttctcggcatttttcttctgcatctccagttcataaagcttcgctttcatctgcttcatggcctggtctttgttcttgtgctgggaacggtcgttctggcactgagtcacgatcccggtcgggatgtgagtaatacgcaccgcagattcggtacggttaacgtgctgaccgcccgcgccggacgcgcgataaacgtcaatgcgcagatccgccggattgatttcgatatcgatatcgtcatcaacttccgggtaaacaaacgcggagctgaacgacgtgtggcgacgaccgccggagtcaaacgggctcttacgcaccaggcggtgaacgccagtttctgtacgcagccagccgtaagcgtaatcgccggagattttgatcgttacggatttaatacccgccacttcaccttccgactcttcgataatttcagttttgaaaccacgcgattctgcccagcgcagatacatacgctcaagcatgctcgcccagtcctgtgcttccgtaccgccagaccccgcctgaatatcgaggtagcagtcggcgctgtcatattcgccagagaacatacggcggaactcaagctgcgccagtttttcttccagggcgtcgagttcagcaacggcttcgttaaaggtttcttcgtcgtcagcttctacagccagttccagcagaccagaaacatcttccagcccctgtttcatttggtcgagggtgtcgacaacggcttcgagggaggaacgctctttacccagcgcctgtgcgcgttcgggttcgttccagacatccggctgttccagctcggcgtttacttcttccagacgctctttcttggcgtcgtagtcaaagataccccctaagaacgtcggagcgttccgtgaggtcctgaatgcgattatttaccggattaatttcaaacatggtctgatttcttttattgagctagtcaaaatgcggtgataagagcgggattgtacccaatccacgctcttttttatagagaagatgacgctaaattggccagatattgtcgatgataatttgcaggctgcggttgccgcgaaactcgttgatatcgagcttgtaagccagttgcacttcgcgcacaccgttatccggccagagggcggtatcgacattaaaagcaatcccgtccagcagtggaccgccgccgaccggttcgaccatcaccttcaaatgacgctcgcccaccagccgctgttgcaacagacggaaatgaccgtcaaacaacggttccgggaacatctgcccccacgggccagcatcacgcaacagctgcgccacttccatggtcatctctgccgcacttaatgggccgtctgataccacttccccttgcaataaagaaggatctaaccactcggtaaccagttcgccaaagcgttgctgaaagagttcgaatttatcctcttccagcgacaatcctgccgccatcgcatggccgccaaacttgagcatcatgccggggtaaagcgtgtctagccgctccagcgcatcgcgcatatgcagcccctgaatggagcgaccggaacctttcagcgtaccgtcgcccgcaggcgcaaaggcgataaccggacggtgaaaacgctctttgatacgcgatgccagaatgccaacaacgccctgatgccattcagggtgatacattgccagcccacctggcagcgtgtcgcggctacgttccagcttctcgcacagagtgagcgcttcaacctgcattccctgttcgatctctttacgtgtttggtttagtgcatcgagttcattcgccagcacacgcgcttcgccaatgttgtcacacaacaacagcgccacgccaacggacatatcgtccagtcgcccggcagcattgagacgtggccccagcgcaaaacctaaatcgctggcggcgagtttttgtggatcgcgattggccacttccagcagcgctttaatccccggacggcactttccggcacggatgcgactcatcccctgccaggtcagaatgcgattattagcgtccagcggcacgacgtccgccactgtccccaacgctaccagatccagcagttctgccagattaggaattgcgatgccgcgctcatcaaaccagccctgatcgcgcaaaaaggtgcgcagcgccagcatcagataaaacgccacacccacgcctgccagtgatttcgacgggaaattacagtcgcgcaagttagggttaatgatcgcttccgctgcgggtaatgtgtcgcctggcaaatggtgatcggtaacaataaccggaatgcccaacgaacgagcgtgttcaacccccgcatgggaggaaataccgttatccaccgtgacaattaactgcgcgccacgggcatgagcctgatcgactacttccgggcttaagccgtaaccgtcttcgaaacggtttggaaccaggtagtcgatattgctgcaaccaagcgagcgcatcgccagcacgcttagagccgtgctggtcgcaccgtcggcgtcgaaatcaccgaccacaataatccgcgttccttcgcgaaaagcgttgtaaaggatctcaacggccttttcgacgccgctcagttgctgccagggcagcatgcctttaacactgcgttccagttcctgcgcgctacgcacaccccggctggcatataaacggcgcagcaagggaggcaattcagcgggcaagtcggccgtttcatcgacttctcggcgacgaagttgtatctgttgtttcacgcgaattatttaccgctggtcattttttggtgttcgtcgaggaattctttcatgtctttcggcggctggtaacccggaacaagtgtgccattgctcagcacaactgccggagtaccgctaacgccaagctggacgccaagtgcgtaatggtcggcaatatccacgtcgcagctggctggtgcgacgcttttacctgccatcacatcatcaaacgctttgtttttatctttcgcacaccagatagctttcatttctttctctgcatcgctgtccagcccctggcgcgggaaagcaagataacgcacggtgatccccagcgcgttatagtctgccatttgctcatgcagtttgtggcagtaaccacaggtaatatcagtaaacacggtgatgacgtgtttttcctgcggcgctttataaacgatcatctctttttcaagcgcattcaactgctttaacagcatcttattggtgacattgaccggagccgtgccactaacgtcatacattggcccctgaatgatatgtttaccatcatcggtgatgtacaacacaccgctgttagtcagaactgtcttcatgccagctacgggcgcgggctgaatatcgctgcttttgatgcccattttggctaacgtttgttgaattgccgcgtcatcagcctgaacaaagcctgaaaacgctgccaacaaggtaaataacataaaacctttcttcataaattttcctgttcttttcagacatcacgcccgcgggtgatgctgttgatgaagttgccgcagacgctcggtagcgacatgcgtataaatttgcgtggtggagagatcgctgtggcccagtagcatctgcaccacgcgcaaatccgcaccatgatttaataagtgagtggcaaaagcgtgacgcaacacatgcggtgacagcttttcgctgtcgatacccgccagcacggcataatgtttaatgcggtgccagaaggtctgtcgcgtcatctgctgcgcacgctggctgggaaacaacacgtcaattgacacaccattcaacagccacggacgcccatgttccagataggtttccagccagtaaaccgcctcttcacctaacggcaccaggcgctctttgttgcctttaccaatgacccgcaccacgccctgacgcaggctgatatcactcattgtcagcccgaccagttcagagacacgcagtccggtagcatacaacacttcaagcatggctttatcgcgtagctccagtggctgatcaattaatggtgcctgtaataaacgttcgacctgcgcttcgcttaaatcttttggcaaacgctggggcaatttcggtgaagcgagatgcgcactgggatcatcttcacgaaacttttcgcgataaagatactggaacaatcggcgcactgcactcagcaaacgcgctgagctggtggctttatatccgccctccagccgttctgccagtaatgcctgcaaatcgtcactttgcgccgtcgccagcgtcaacccgcggtgatgcaaccactccaccatcattgacagatcgcgacggtaagcgttcaacgtattttcagccagatttttttccagccacagagcatcaagaaactgctcgatgcgtgccagatcctgtttcacttgcgccccttatggtcactcatttgatccattatgccttattgtgccgtgactaaagcgattctgatacactagccgcaaaagccacagcagaatcgagaagcttacgttatgaatatgggtcttttttacggttccagcacctgttacaccgaaatggcggcagaaaaaatccgcgatattatcggcccagaactggtgaccttacataacctcaaggacgactccccgaaattaatggagcagtacgatgtgctcattctgggtatcccgacctgggattttggcgaaatccaggaagactgggaagccgtctgggatcagctcgacgacctgaacctcgaaggtaaaattgttgcgctgtatgggcttggcgatcaactgggatacggcgagtggttcctcgatgcgctcggtatgctgcatgacaaactctcgaccaaaggcgtgaagttcgtcggctactggccaacggaaggatatgaatttaccagcccgaaaccggtgattgctgacgggcaactgttcgtgggtctggcgctggatgaaactaaccagtatgaccttagcgacgagcgtattcagagctggtgcgagcaaatcctcaacgaaatggcagagcattacgcctgatgtcactgacggcttagcacatatgctttgccgtcatctttatctttgcgtctcttgttgtaacaatatccgccgtaaatcccgccattcggcttcgtccatgctgtcagctgccagccataaatgttgccgttttccgctgtcagaacgtaaacgcagcatcatgccgctcttaatcatccacggcgctttgacgatgctccactcctgcccttgccaacgcaaacgcccgtccatcaacaagcgaatttccccctggcgagcattaatgcgccgctggctgcgaacgcaatcaaacaccaccagcgaaagtaacaccatccataacggggtgtaactgagcggccagggcatgagtaaaataacagcggcaaccagcccatgaatcagcaaggaaagccactgtgcgcgccaggagacgcgcaaatcagattgccacaggaccacgttcccggttccgtgtctggatgagtcggaccatcatttccagttctgcatcggccggtttaccgtgattcatcagccagttaaacaggtccggatcgtcacattccagcaaacgaataaagatgcgtttttcgtcatcgcttaagctgtcgtactcatgttcgaaaaacggcatgattgaaatatcgagttcgcgcataccacggcggcatgcccaatgaatgcgggctttgttgttaatgtccatcttcttcctgtctcacgaaaatccagtacccggctattgtaacgtgtttttcgacttcttttacgggaatatcagtaaacacaatcgcgatcgcgaaattaattcacaacaattcaagggcttcatttttttggaagtcgcctcgcagaaggcacagatcgcgtagtgaaagcacttgcattgcctcatagctcttttaccattagttattaatacgccgttaagcaactcaggactctattatggcttttacaccttttcctccccgtcagcctacggcttctgcccgtttgccactgacgctgatgacgcttgatgactgggcgcttgccactattactggcgcggacagcgaaaaatatatgcaaggccaggtgacagcagatgtcagccagatgactgaagatcagcacctgctcgccgcccattgcgacgccaaaggtaaaatgtggagcaatttacgtctgttccgcgacggcgatggctttgcatggattgaacggcgcagcgtgcgtgaaccgcagctgactgaactgaaaaaatatgcggtgttctctaaagtgaccatcgcgccagacgacgagcgtgtgctgcttggtgttgccggttttcaggcgcgcgccgcgttggcaaatctctttagtgaactaccttcgagagaaaaacaggtagtcaaagaaggcgcgaccacgttgctatggtttgaacacccggcagaacgtttcctgatcgtaaccgatgaagctactgccaatatgctgaccgataaactgcgcggtgaagcggaactgaacaatagccaacagtggctggcattaaacattgaagcgggttttccggtgattgatgccgccaacagcgggcagtttatcccccaggcgaccaacctccaggcgctgggcggtatcagctttaagaaaggctgctataccggacaagagatggtggcgcgagcaaaattccgtggtgccaacaaacgcgcgctctggttgctgaagggtagcgccagccgactgccggaagctggtgaagacttagagctgaaaatgggcgagaactggcgtcgtaccggtacggtgctggctacggtcaaactggaagatggtcaggttgtggtgcaggttgtcatgaataacgatatggaaccggacagcatcttccgcgtgcgtgacgatgcgaatacattgcgtatcgagccactgccatattcgctggaagagtaaatctctgtatcgcatcaggcatttatcgcctgatgcgacactggtgtgtcttttcaggcctacaaaggcacgccaattacgcctgcccaatatacaaatagatcgccagaaagtggcacacactaccgccgagcacaaagccgtgccagatggcatgattgtatggaatgcgcttgcagacgtagaaaatcaccccgagcgaataaaccacaccgcctaccgccagtaaggtaacgctgcccgccgcgagcttaactgccatttcataaattaccaccagcgacagccagcccatcgctagataggtcaccagagataaaattttgaatcggtgcgcgatggtcagtttaaacagaatacccagcaatgccaggctccagataacaatcatcaacccgcgcgctaacggagaatccagccccaccagcaaaaacggcgtgtaggttccggcaatcaacagataaatggcacagtggtcaaatttcttcagccacatttttgcccgttgatggggaatggcgtgatagagcgtcgaagcgaggaacagcaggatcatactgccgccatagaggctgtaactggttatcgccgtggcgctggcattgagatccaccgcctgaaccagtagcaacaccagcccaacgataccaaacaccagcccaatgccgtgactgacgctgttggcaatttcctctgccagcgaatatccctgcttaatgaggggcttctgaaccataacttactccggaaaaacgtacacgcacatgtatacctctccagcgtaactgagaatagttccagtgaacacctgttagctaaaataaattctgatttgagattaatctccgaaaaatcatgaaattaaatgcaaaatttcaactaacaggcgtgagttcaatttaaagacatttaaattcaatcacataaaactgtgtctggtcgggatagatgtcggcaatgacctttttcagttcagtcagggtcatattttcctgctctgcatgtttttccgtcagcgtatccagcgttacggttgaggttgcggtgacttcaatcgtgcaaaaataaccgtcatcttcaaaacgtccgacacgaagcacatcacccgttttgaagtgcgattcagactcgtcgcggatggtgatggttttacgcccagccagaatgtcatcctggaaacgttgaaaaaaagtgatgtcgtttggctgcatggtaatatttcctgtaagaattgactcatctggagcctatgatagtgaaaaaactcaccttaccgaaagatttcttatggggcggcgcagttgccgctcatcaggtcgaaggcggctggaacaaaggcggcaaagggccgagcatttgtgacgttttgaccggtggcgcacacggcgtgccgcgcgaaatcaccaaagaagttgtgcctggcaaatactatccaaaccatgaagccgttgatttttatggtcactacaaggaggacatcaagctatttgccgaaatgggcttcaaatgttttcgtacttccatcgcctggacgcgcatttttccaaaaggcgatgaagctcagccaaacgaagaagggctgaagttctacgatgatatgatcgatgaactgctgaaatacaacatcgaaccggtgatcaccctctcccactttgaaatgccgctgcatctggtgcagcaatacggtagctggaccaaccgtaaagtggttgatttctttgtccgtttcgcggaagtggtattcgaacgctataagcacaaagtcaaatactggatgaccttcaacgaaattaacaaccagcgtaactggcgtgcaccgctgttcggttactgctgctccggcgtggtgtataccgaacatgaaaacccggaagagaccatgtatcaggtgctgcatcaccagtttgtcgccagcgccctggcggtgaaagccgcgcatcgcatcaacccggagatgaaagtcggttgtatgctggcgatggtgccgctctatccttactcctgtaacccggacgatgtgatgtttgcccaggagtcgatgcgcgaacgttacgtctttaccgatgtgcagttgcgtggctattacccgtcctatgtgttgaacgagtgggaacgccgcggatttaacatcaaaatggaagacggcgatctggatgtactgcgcgaaggcacctgcgattatctcggcttcagctattacatgaccaacgcggtgaaggccgaaggtggcaccggcgatgcgatttctggtttcgaaggcagcgtaccgaatccgtatgttaaagcgtctgactggggctggcagattgatccggttggtctgcgctacgcactttgcgagctgtatgagcgttaccagaagccgctgtttattgtcgaaaacggttttggcgcttacgacaaagtggaagatgatggcagcatcaatgacgattaccgcattgattacctgcgtgcccatattgaagagatgaaaaaagcggtgacttacgatggcgtggacctgatgggctacacgccgtggggctgcatcgactgtgtgtcgttcaccaccgggcagtacagcaaacgctacggctttatctatgtgaataaacatgacgacggtactggcgatatgtcgcgttcacgtaagaagagctttaactggtacaaagaggtgattgccagcaacggcgagaatctgtaattagccgatgtgcctgatgtgctccgctcatcaggcctggcactcttttaatatattgagctcgcaatattttatattacgcctcagccgaaacacacaaagcgcactttattaacaagcgaaaaaggcgccgaagcgcctttataagatagtcgaatcagtaaattactggtattcgctaatcggtacgcaggagcagaacaggttacggtcgccgtaaacatcatccagacgtttcacggtcggccagtatttgtctgccacacctgccgggaatactgcaacttcacggctgtacggatgcgcccactcggcgaccagttcgctttgaatgtgcggcgcattcaccagcgggttatcttccagcggccagacaccggctttcacctgatcaatttctgcgcggatagccagcatcgcatcgataaagcgatccagttccactttgctttcagattcagtcggttcaaccatcagcgtacccgccaccgggaacgacatggtcggcgcgtggaaaccgtagtcgatcaggcgcttggcaatatccagctcgctgatgccggtttcttctttcagcgggcgaatatcgagaatacattcgtgcgccacgcgaccgtcgcgaccggtatacagcaccgggaaggcatcctgcagacggctggcaatatagttggcgttaagaattgccacctggcttgcttttttcagcccttctgcgcccatcatgcggatgtacatccagctgattggcaggatagaggcactaccgaacggtgccgcagaaaccgcgccctgacgggttaacatgccttcgatttgcaccacgctatgacccggtacaaacggagccagatgcgctttcacaccgatcggtcccatacccggaccaccaccgccatgcggaatgcagaaagttttatgcaggttaaggtgggaaacgtccgcaccaataaagcccggcgaggtgatgccaacctgagcgttcatgttcgcgccatcaaggtaaacctgaccgccgaactgatgcacgacttcacacacttcacggatcgtttcttcatacacgccgtgggtagaaggataggtcaccatgatacaggagaggttatcgcccgcctgttccgctttcgcgcgcagatcagtcagatcgatgttgccgtttttatcacacgcaacaaccaccacctgcattcctgacatatgcgcggaagccgggttagtgccgtgcgcagaagccgggatcaggcagatatcgcgatgcccttcgttgcggctttcatgataatgacgaatcgccagcaggcccgcgtattcgccctgtgcgccagagttcggctgcatacaaacggcgtcgtaaccggtcagtttcaccagccagtcagccagctgcgcgatcatctgctgataaccttcagcctgttctggcgggcagaacgggtgcagttcggcaaattccggccaggtgatcgggatcatctcggcggcggcgttcagtttcatggtgcaggaacccagcgggatcatcgcctgattcagcgccagatctttacgctccagcgagtgcatatagcgcatcatttcggtttcgctgtggtagcgattaaacaccggatgggtgaggatttcgtcgtcgcgcagcatcgcagcctgaatagagcgactgtcgtgagccacgtctttgtccagtgtgtcgatgtccagcccgtggttatcgcccaacagcacgctgaaaagctgcatcacgttttcgcgcgtggttgtttcatcaagggtgatcccaaccgcgttcagaatatcgctacgcaggttgatttcagccgcttcggcacgcgccagcacgcccgctttgtcggccacttccacacacaaagtatcgaaatagtgcgcatggcgcagcttcagacctttttgttgcaggcccgccgccaggatatcggtcagacggtggatgcgattagcgatacgtttcaggccaaccggaccgtgataaacggcatacaggctggcaatgtttgccagcagtacctgggaagtacaaatgttggagttcgctttctcacgacgaatatgttgctcgcgagtctgcatcgccatgcgcagagcggtgttgccagctgcatctttcgatacaccgataatacggcccggcattgagcgtttgtattcgtctttcgccgcaaagaatgccgcgtgtgggccaccatagcccatcggtacgccaaagcgttgcgccgaaccaaaaacaatatccgcgccctgtttacccggcgcagttaacagcaccagcgccataatatcggcggcaacgctgaccacgattttgcgtgatttcagttcgctgataagcgcggtgtagtcgtgaatttcaccagtagtgccgacctgctgtaacagcacgccgaagacgtcctgatggtcgagcactttttgcgcgtcatcgacaatcacttcaaaaccaaaggtttcggcacgagtacggaccacatccagcgtttgcggatgaacgtcagaagcaacaaagaagcggttggcatttttcagtttactgacgcgtttcgccatcgccattgcttcggcggcagcggtggcctcatccagaagagaagccgaagccatatccagcccggtcaaatccagcgttacctgctggaagttgagtagtgcttcaaggcggccctgggagacttcaggttgatacggagtatacgcggtataccagcccggattttccagcatgttacgcaggataaccggcggtagctgcacggcggtgtaacccatgccgatgtaagacgtgaagcgtttattgcgactggcaatagccttgagttctgccagtgcggcgtattcggtcgccggtgcgccaacctgcggtggtgtcgcaagctgaatatctttcggcacaatctggccggtcagcgcgtttaacgattgtgcaccaacggcattcagcatttcttgctgttgcgcggcgtccggtccgatatggcgttcaataaaagcgccgctgttttcaagctggcttaacgtctgtgtcatgagcgatggttcctgaaacgtgcagtgaattgtgaacctctctccttgcgaagagagtgagggtgaggcgtaaatttcctcaccctgatcctctcccgcagaagaggaataaagccgttactcgtcttctaacaatgcttcgtatgcggttgcatccagcagtgattccagttcgctttcatcgctggctttgattttgaaaatccagccgcctgcatacggttcgctgttcaccagttccggagaatcgctcagtgcatcgtttaccgccacgatttcaccgcttactggcgcataaatatctgacgccgcttttaccgattcggcaaccgcgcagtcatcgcccgcgctaaccgttgcgcccacttccggtaggtcaacaaacaccatatcgcctaacagctcctgagcgtgttcggtgatgccaacggtgtaagtgccgtcggcttctttacgcaaccattcgtgttctttgctgtatttcagttctgctggtatgttgctcatcaatcaatctccaaaaaagtaaatcacgcgacggctttgccgttacgcacaaaaacaggtttcgtcactttaaccggcatttcacggttgcgaatttgcacaatcgccgtttcaccaataccttccggcacgcgcgccagcgcaatgctataacccagcgttggggagaaagtaccgctggtgataatgccttcatgctggttgccctgcgcatcagtaaaacgtaccggcagttcattacgcagcacgcctttttcggtcatcaccagaccaaccagtttttctgtgccatgttcacgctgcgcttccagagcttcacgaccgataaagtcacgatctgccggttcccaggcgatagtccagcccatattggcggctaaaggagaaatagtttcgtccatctcctggctatacaaattcatgcccgcttccagacgcagcgtgtcacgcgcgcccaggccacatggcttaacgcccgcttccaccagcgcgcgccagaaatcggccgctttttcattgggcagcgcaatttcgtagcccgcttcaccggtgtaaccggtggtggcaataaacagatcgcccgcctgcacgccaaagaacggtttcatcccttccaccgcctgacgctgggcgtcattaaacagtgtggcagcttttgcctgcgcattcggcccttgtacggcgatcatggaaaggtcatcacgaacagtaatttcgatgccgaaaggttcagcgtgttgggtaatccaggagaggtctttttcgcgggtggcggagttaacaacgaggcggaagaaatcttcagtaaagtagtagacgatgagatcatctatcacaccgccagaggcattcaacatccccgagtaaagggctttgccgcttttggtgagcttcgccacatcgttcgccagcagataacgtagaaactcccgggtgcggctgccgtgaagatcgacgatggtcatatgtgacacatcaaacattccggcatcggtacgtaccgcatgatgttcgtcgatttgcgaaccgtaatgcagcggcatcatccagccgtggaaatccaccatgcgagcgccgcaaagcgtgtgttgttcatacaaaggagtctgttgtgccatcttgtcctcattgaataagcggggctgacaactttttcatggtgaaattatcaccacgaaacccagcatcggagccactcccggtccccaacgcaatcgttctcttttgcctgaacttaccaccgaaacagactgttaaccataaggttaaattgatcatcacattagcttatggttaaaaaacgccaaaatcgtaacagaataaaaaaccaaaaaatgaacaaatctctatataaagataaatagatgagaaagttaatttgaataagacaacattaagaactaaaaaaatgtcaaaaaacactaaatcaaaaattcgtggcattagaaaatataatgcgaaatcgcaggtgaaattagtttatttcaaatgaggaaaatctcccggcgaaaaaaccgggagatgaaagtgtgatgggtatcaaataaacagcagaagagaaatatttaacgcagccattcaggcaaatcgtttaatcccattgcctgacgaataagttgtggcttaacgccaggaagcgtatcagccagtttcagaccaatatcacgcagcaattttttcgccggattagccccggaaaacagatcgcggaatccctgcataccagccagcatcagcgccgcgctgtgcttgcggctacgctcatagcgacgcaggtaaatgtactgcccgatgtctttaccctgacgatgcaaccgtttcagttcagcaatcagctctgcagcatccataaagccgagatttaccccctgccccgccaacgggtgaatggtatgcgcggcgtcgcccaccagcgccagacggtgcgcggcaaactggcgcgcataacgccccgttagcgggaacaccaggcgctcactttcaaccttgcataagcccaggcgattatcaaaagcgatatttaacgcgcgattaaattcgtcttcactagcctgctgcatccgcagcgcttcctctggcgacagtgaccagacaatcgagcaaagatacggatcgctaagcggtaaaaaggccagaatgccttcgccatggaaaacctgccgcgccaccgcatcatgcggttcttccgtgcgaatggtcgccaccagcgcgtgatgctgataatcccagaaagtcagcggaatatcggctttgttgcgcaaccaggaattagcgccgtctgcgccaatcaccagacgcgccgttaacatgctgccatctttcaacgtcaggaaggtttcattttctccccaggcgacctgctgtaattctgcgggggccaacagagtgatatctgacgactgctgcgctttgttccacagcgcgtagtgaatcactgagttttcaacgatatgcccaagatggttatagcccatgctttgatcgtcaaacgagatgtgaccaaaactgtctttgtcccacacttccataccgtgatagcaactggccctacgagagagaatgtcctgccagacgccaagacgagtcagtaatttttcgctggcggcattgatagccgaaacgcgcagttgtggtggtgcatccgccgccagaggttccggtacgcgctgctccagtacggcaacgcgtaagccgctaccctgtaagccgcaggcaaccgccagcccgaccatgccgccgccaacaatggctacatcaacactttgcattgtttattccttaaaaccgccttcaacgcgccacccaaccaagagtgcgctgcgccagcacatcgcgtgctggggtaaataattccatcgtcatcagcccgatgttgcgcccgacaaccagcggcgtccaacggttggcaaaaagatgtacaaggctgtccgtgacgccgatggttgcttcgcgatcgctctgtcgacgctgctgataacggcacaatacgccgtaatcacccatgtcttctccgcgttcctgcgcctgagtcagggtttccgcaaggctcatgacatcacgcataccgaggttaaatccttgcccggcgatgggatgcagagtttgcgccgcattgcccaccagcacggtacgatgggtaataggtttggcggcgcgggttagcgctagcggataagcactgcgtttaccggcatgagtaattttcccaagtcgccagccaaaggccgactggagttcacggcaaaacttctcgtcgctccacgacagcacctcttcgcgccgttccagtggatgacaccagaccagcgaacagcgtccgtcagacatcggcaacatcgccagcgggccatgttgcgtaaagcgttcaaaagcgcgcccttcatgcgcaacggaagtcgcaacgttcgcaatcacagccagttgttcgtaaggatcctgctgccagtcaacgccgcacacggtggctaacgctgaatgggtgccatcagcggctaccagcacgcggcccgtcagcgtctcaccactctccagcgtcacttcaacgtggctctgagtacgggcaacgttagccacgcgatcagggcaatgcagcgttacaccaggtgctttgcgcagcaatgcaaacagccgttgcccgacattgtgcaattcgacaacctgccccagcgccgccagttggtaatcttctgcggcgagggtgacaaatccagcgtgaccacgatcgctgacatgcactgtggtgatggcagttgcgcaatcagccagagattgccagacgccgatgcgcgccagttgctgacaggtacccgccgccagcgcaatagctcgtccatcaaagcccggatgcgcatgtgactctggcgcggtcgcttcaatcaaatgtactggcagcgccccgtgacttaaccgggaaatagccagcgccagcgtcgtgcccgccatgccgccaccgacgatgattacgctcattgctttctcgcagctgccatcaacgcttcgatttcttccggctttttcaccacgctggcggtgaggttttcattaccggtttcggtaatcacaatgtcgtcttcaatacgaatgccgataccgcgatactgttctggcacttctgcatccggcgcaatatacagccctggttctacggtcagaaccatacccggttccagaatacgcgagcgatcctgaccataaacaccaacgtcatgaacatccagtcctaaccagtggctaaggccatgcataaagaaaggacgatgggcgttctgagcgatcagttcatcaacatcacctttcaggataccgagttttaccagaccgctaaccatgatgcgcaccacttcaccagtgacttcctgaatggaagttcccggacgatacagacgcaggctggtttcaagagactccagcacaatgtcatagatttcacgctgagcctgagtgaatttgccgttgaccgggaaggtgcgggtaatgtcgccagcgtaacctttgtattcacaacccgcgtcaatcaacaccaggtcaccgtcacgcagttcacactcgttttcggtgtagtgcaaaatgcagccgttttcaccgctgccaacaatggtgttataggaagggtaacgcgcaccgtggcggttaaattcgtggtgaatttcgccttccagatggtactcgaacatccccggacggcatttttccatcgcccgtgtatgcgccagtgcggtgatttcacccgcgcggcgaagtacggcaatctcttctggtgatttgaacaggcgcatttcatgaacaacaggacgccagtcgatcatcgttgccggtgcggtgagattttgccgcgaacctttacgcagtttctcaagcgcgctgttcacgatttcatcagcatatgcatattcgccctgggcgtggtaaaccacatccagaccattaagtagttgataaagttgctgattgatttcgctgaatgccagtgcgcggtcaacgcccagtttctctggcgcggcatcctggcctaagcgacgaccaaaccagatctctgccgtcaggtcgcgaacgcggttaaacaaaacgctgtggttatgagtgtcatcgcttttaatcagcaccagcaccgcttccggttcgttaaagccggtgaagtaccagaagtcactgttctgacgataggggtattcgctgtcggcgctacgtgttacttctggtgcagcaaaaatcagcgcggcgctgccgggttgcatttgctctaccagggcctgacggcgacgctgaaactcttgccgggatatatcactcataacactctccttacattttttgtttttagtgtagagtcggtttttgtacttctggcgcggtcggttgcggatgagtaaaggtgtcgtggcataacagcgcggcaacacggacgtactcgatgatctcttcaagcgacatttcaagctcttcctgatcttcgtcttcgtcgtaacccaactgcgcgatgttacgcagatcgtcgatggcttcaccggtttcgccggtcactttgtccagcttcggttgcgtaacgccaagaccaagcaggaagtgattgacccaaccagccagcgcatcagcccgatcgaaaacgctgacatcatcgccatcaggcagataaagctgaaaaaggaagccgtcatcctgcagggcatcgctggtggcagagtgcattttgcgcagtgcctgtgccagctcatgaccgaaagccatgccttcgttcgtcaggtcgtgaagtagcggcagccatgagctgtcatcgttaccgccacatatcatcccactgattaaaccatgcatctcagcaggggtcagacccgtcccttgttggttcagatactggttcatttcgttgtaaccaggcatttcgttctgtatagacataagcattcgtcgtcaaagggaggaatattcatgatatgctaccactttgggccctggtggaccagaaaagggcttgtctcttctcatcagggtagctatagtgtcgccccttcgcagaccatgggtctaaagacgaaggcagcgcagtcaatcagcaggaaggtggcatgtctgcacaacccgtcgatatccaaatttttggccgttcactgcgtgtgaactgcccgcctgaccaaagggatgcgttgaatcaggcagcggacgatctgaaccaacggttgcaagatctgaaagaacgcactagagtcacaaatactgaacagttggtcttcattgccgcattgaatatcagctatgagttagcgcaagaaaaagcgaagactcgtgactacgcagcaagtatggaacagcgtattcggatgctgcagcagaccatagaacaagcgttacttgaacaaggtcgcatcaccgaaaaaactaaccaaaactttgaatgacacttttcggtttactgtggtagagtaaccgtgaagacaaaatttctctgagatgttcgcaagcgggccagtcccctgagccgatatttcataccacaagaatgtggcgctccgcggttggtgagcatgctcggtccgtccgagaagccttaaaactgcgacgacacattcaccttgaaccaagggttcaagggttacagcctgcggcggcatctcggagattcccttcttacctggcaccagccatgacgcaactaccagaactcccactgacattatcccgacaagaaatccgcaaaatgattcggcaacgtcgtcgtacgttaacgccggaacaacagcaggaaatgggtcaacaagccgctacccggatgatgacgtatcccccagtggtgatggcgcatacggtcgctgtattcctctcttttgatggcgaactcgacacccagccactcatagaacaactctggcgcgccggtaagcgcgtatatcttccagttttgcatccctttagtgccggtaacttgctgttcctgaattaccatccgcaaagcgaactggtgatgaacaggttgaagatccacgagccaaaactggacgtgcgcgatgtgcttcccctttcccggttagatgtattgatcacgccgctggtggcttttgatgaatacggtcaacgcttgggaatgggcggtggtttttatgatcggaccttacaaaactggcagcactataaaatgcaaccggtgggttatgcgcatgattgccagttagtagaaaaactcccagtggagaaatgggatattccactgcctgcggtggttacaccgtcgaaagtctgggaatggtaagggcgatacatcccgcatcgccctgattgacatcgttgattctttgacctaatttagtgagtaagggtaagggaggattgttcctcccctgtgactgactgttaataagctgggaaacttatgagtaacagtacaatcagtatgatgacaagtcgcatcataacccttctccttcaagccctcgcttcggtgagggctttaccgttacagccccatgctgccctgccatcgtaaatccccattaaataaacacaacgcattgatctgactttgatttattttctggagcagactcgcaaagtagaatgcgcaatgcggcaacggtgtggagaagggataaaaaaacgggcaagtcagtgacctgcccgttaattttcagagaaggggaattagtacagcagacgggcgcgaatggtacccggaatagctttcattgcctgcagcgctttttcggcaacgtcttcgtcggcttcaatatcaataactacataacccatctgggcggaagtttgtagatattgcgcggcgatgttgacgccctgctcggcaaaaattttgttgagcgcagttagcacgcccggacggttttcgtggatgtgcatcagacgacgcccaccgtgcagtggcagcgagacttccgggaagttcaccgcagagagcgttgagccattgtcagaatacttgatcaatttacccgcaacttccaagccgatattctcctgcgcttcctgagtcgaaccgccaatgtgtggcgtcagaaggacattgtcgaattcacacagcggagaggtaaatggatcgctattggtcgccggttccgtcgggaatacgtcgattgccgcccccgccagatgtttgctcgccagcgcgtcacacagcgctggaatatccaccacagtaccgcgcgaagcattaatcagcagcgagccgggcttcattagcgaaatctctttcgcgcccatcatatttttggtggacggattctctggtacatgcagactcaccacatcgctcatattcagcaggtcagaaagatgctgtacctgagtggcgttgcccagcggcagtttgttttcaatatcataaaagtaaacatacattcccagcgattcagccagaatgcccaattgcgtaccaatatgaccgtagccgatgatacccagctttttgccgcgcgcttcaaaagaacccgccgccagtttgttccacacgccacgatgcgctttagcattggcttctggcacgccgcgcaatagcagcagcagttcgccaatcaccagctccgcaacagagcgcgtatttgagaacggtgcgttaaataccgggatcccgcgctttgccgccgcatccagatcaacctgatttgttccgatacagaaacagccaatagcgaccagtttttctgcggcgttgatcacgtcttcagtcagatgggtacgggatcgcaggccgatgaagtgggcatcgcggatggattcttttaattgttcatcatccagcgcgcctttgtgaaattcgatgttggtgtaaccagctgcacgaaggctttccagcgccttttggtgcacgccttctaccagcagaaacttaatcttgtctttctccagcgatacctttgccatttacccaatcctgtcttttgaaatgttgtgtgcggatttgcatccgcctttcaacatatcaaaaaataatattgcggcaatatgaacgtttgcgtcgcgatgttgaggaaatatcacgcaaaagtatttcttggatgaatatgctggtttagaagatttatttagagcaatcgacaattgccaggtaaaaacgtgacacatgtcaccaaatttaatgaagagaatttttttaacgggggaggttcccccgtcagatcatttcacaatagttttgacaccgtcaggtgtgccaatcagcgcaacgtccgcgccacggttagcaaacaaaccaacagtcaccacaccaggaatcgcatttatggcgttttccatcgctatcgggtcaaggatttccatgccgtggacgtcgaggatcacgttgccgttatcggtcactacgccctgacggtattccggacgaccgcccagtttcaccagctggcgcgccactgcactacgtgccatcgggataacttctactggcagcgggaatttgcccagaatatcaacctgcttggaagcgtctgcaatacagataaatttttccgcaaccgaagcaatgattttttcacgggtcagcgccgcgccgccgcctttgatcatttgcatgtggccgttgatttcatctgcgccatcaacgtagatgccaaggctgtcgacttcgttgagatcaaaaacgtgaatgccgaggcttttcagtttttcagtggaagcatctgaactggaaacggccccttcaatctggcctttcattgtaccgagtgcgtcaataaagtgtgcggcggtggaacctgtacctacaccaacaatggtgccgggctgaacatactgaagtgccgcccatcctactgcttttttcaattcatcctgcgtcatgatcgtttcgcctgtggtatgaaatttcacacgcattatatacaaaaaaagtgattcagaccccgttggcaagccgcgtggttaactcatccataaaatatcgcgcaatggcgggcatcccctttcgccccgcaaataaagcatacaacggtctggggatgccgctccacggtgcaaacaggcgcaccagttccccgttcgcaagcccctgtttacaggcaaactgaggcaataacgccacgccattcaacacaaccagggcgcgaactcgctgagcgaaatgcattagcgcaaatccctgatcttttaagctgcgcgttaaccactgatacaaatgttacccgccaacggcttcggtatatgcaacccgacacaaaattgtgtcatagtgcaggaaaaagcatttaccaggagcagacaacagcaatgaaacgcccggactacagaacattacaggcactggatgcggtgatacgtgaacgaggatttgagcgcgcggcacaaaagctgtgcattacacaatcagccgtctcacagcgcattaagcaactggaaaatatgttcgggcagccgctgttagtgcgtaccgtaccgccgcgcccgacggaacaagggcaaaaactgttggcgctactacgccaggtggagctgctggaagaagagtggctgggcgatgaacaaaccggttcgactccgctgctgctttcactggcggtcaacgccgacagtctggcgacgtggttgcttccggcactggctcctgtgttggctgattcgcccatccgcctcaacttgcaggtagaagatgaaacccgcactcaggaacgtctgcgtcgcggcgaagtggtcggcgcagtgagtattcaacatcaggcgctgccgagttgtcttgtcgataaactcggtgcgctcgactatctgttcgtcagctcaaaaccgtttgccgaaaaatatttccctaacggcgtaacgcgttcggcattactgaaagcgccagtggtcgcgtttgaccatcttgacgatatgcaccaggcctttttgcagcaaaatttcgatctgcctcctggcagcgtaccctgccatatcgttaattcttcggaagcgttcgtgcaacttgctcgtcagggcaccacctgctgtatgatcccgcacctgcaaatcgagaaagagctggccagcggcgaactgattgacttaacgccagggctattccaacgccggatgctctactggcaccgctttgctcctgaaagccgcatgatgcgtaaagtcactgatgcgttgctcgattatggtcacaaagttcttcgtcaggattaatccatcaaataatgcctgatagcacatatcaggcgttatcctcacttctttttgtattccttgaatcacattacaaaatagacaaatctcaggcggcaaaaaacgacgtctgaatgcatttttttgctggagacaaacccacgtaaaaagctcaccgtaagcgcaaataccctcattttgattgcgttttacggagcaaataatgtctaacgtgcaggagtggcaacagcttgccaacaaggaattgagccgtcgggagaaaactgtcgactcgctggttcagcaaaccgcggaagggatcgccatcaagccgctgtataccgaagccgatctcgataatctggaagtgacgggtacccttcccggtttaccaccctacgttcgtggcccgcgtgccactatgtataccgcccaaccgtggaccatccgtcagtatgctggtttctcgacagcaaaagagtccaacgctttttatcgccgtaacctggccgcccaccgaggctacgactccgataacccacgcgtggcgggcgacgtcggcaaagcgggcgtcgctatcgacaccggggaagatatgaaagtcctgttcgaccagatcccgctggataaaatgtcggtttcgatgaccatgaatggcgcagtgctaccagtactggcgttttatatcgtcgccgcagaagagcaaggtgttacatccgataaactgaccggcaccattcagaacgatatcctcaaagagtacctctgccgcaatacctatatttacccgccaaaaccgtcaatgcgtattatcgcagacatcatcgcctggtgttccggcaacatgccgcgatttaataccatcagtatcagcagttaccacatgggtgaagcgggtgccaactgcgtgcagcaggtagcatttacgctcgccgataggattgagtacatcaaagcagcaatctccgccgggctgaaaattgatggcttcgtccctcgcctgtcgtttttcttcggcattggcatggatctgtttatgaacgccgccatgttgcgtgcggcacgttatttatggagcgaagcggtcagtggatttggcgcacaggatccgtataacaacgttatccgcaccaccattgatcattgtgcacatcctatgtgtcgggattatctgcatcgctatctggaaaatgcgtccggcggacatattcaccacgatcttagccacgtcttcgacttacaccgtaatttaattgcaaccggatcgatgctgggttaatggtttgtcccgtcacgatcttcagcaatatgctgaagcatcgtggcggtataacgatgatttctgattgaataaagatattcctgcatatacatcggcctgtgcggcgcatcaaaatatttcagcgttgccggattcaccagtcgccaggcaaaatgcgggatcaccgtcagaaaatgtccccgctccacgtcgctgattttggccataaaactatagggacgataaataatggttggattgatcccacaaggacgcatattcgcatcaatcattgcttcgaagttagcccggttttgaaagcgcatttgtagccagggcagctcctgaagcagctcttgctcttgtcgctcttcataacggcgagaaacgagaaagcccaatcgcagcggcggtagttcactgatagtcaggttttccagttcctgaactcgtgcagatacatgctgtggggagattataaaatctaactgacggtcaaaaagattatcgataacgccatttgcgctgaactcaactggctgggcggtcacgccttcgtacttatctccgagactaatcaactgatcaaaaataatggtcggataagtattatctatgcctatcacaatgtctcgtgaacgacgtcctgagttatggatttcattatcaatcgcagaaagtcgttgataaaccgggaacagtttttgatacagttcctgtccggctttattgaggctgatattattatctttgcgggtaaatagcgtatagccaatttgttcttccagcgcggcaatgcttttgccaaatcgcgaagccgtcatatggattttttctgccgcccgggcaatattattggtttgcgctaataaaatgaaattgcgcatctttttcgaaataaaaatgtccatcccccctctcccgcatccttgtccgcttaaccgtttcagtcagcctatccttgatgaaaccgcgagcaaagataggtgattacgtcatggttttacagaaaaaggaggcaatatcgggtaaaggcattagcccgacgaatacgtcgggctacaagtattaatgtgcagcaggtgttttagcgggtggttgatccacaggttctaactggaagattacatcgacctgatcatcaaactgaatagcggcctgctcgtaagtttcctgggcggacaccggcgcggcatcggctttcatcatccgcaccattgggctgggctgatagttggaaacatggtagcgtacgctatataccggccccagtttacgatgaaagccgttcgccagttcctgcgcctgatgaatcgcgttatcaatcgctgccttacgcgctttgtctttataggcatccggctgcgccacgcccagcgacacagaacgaatttcgttaagacccgcctttagcgcgccgtccagcaaggaattcagtttgtctaactgacggagcgtgacttccaccgttctcactgcgcggtagcctttcaggatacttttaccatcctgataatcataatctggctgagtgcgtaagttcgctgagctgatatcttttttcgcgatctgattgagctcaaggaaggaaatgtattgtgcgacgcgctcatctgcctgtttcttggcagtagcggcatccttcgcggccacgttaacttcaatcgcaagagtggcaatgtctggcaccgcatccacgcttgccgtaccggaggtgacaatatgcggtccatccggcaattcgttagcctgcgctgccatcccgctaatacccattaatgccgccagggcgataactttgaacttcacgttagtctctccgtgttaattgacttgcccaaaattcaggacctctggaggcaagcttagcgcctctgttttatttttccatcagatagcgcctaactgaacaaggcttgtgcatgagcaataccgtctctcgccagctgcaaggcaataaaccacataacacatcccactaccagattgataatgcgctgtgattttgccgtgcgcaggcgcggtgccagccaggctgcgagaatagccagaccaaagaaccacaggaaagaggcgctaattgttccgagcgcaaaccaacgttttggttccacatcaagttgcccgccaaggctgcccagcacaacaaaagtatccaggtaaacatgcggattcagccaggtcactgccaacatggtggcgataattttccatctgccttgtttcaggacttcggcactggctaactcaatgttactgctcattgctgttttaaaagcgccaaaaccataccacagcaagaaggctacgccgccccaggtgaccagcgccagcaaccacggcgactgcatcaataacgcgctgccaccaaaaatccccgcacaaatcaggaccaaatcgctgatagcacaaagtaaggcaatcataatgtggtactgacgacgaatgccctgattcatcacaaaagcattttgtggaccgagcggtaggatcatagccgccccaagtgcaagaccttgaaagtaataagaaaacacgttggatattccgaattaagtatctgatgcagagactatatcgcgggattgttattagcggaaattgataatattaattggcaatcagaaaaactaataagagagaggccagagagtattatctggcctcagcgttgattacgcagctttgtcttctttcacccgcttaaagttcacatccatttgcgggtacgggaagctgataccggcggcatcaaattcacgtttaatacgctccagcacatcccagtacacgttttgcagatcgccgctgttgctccagacgcggaccacgaaattaatcgacgatgcgccaagttcgttcagacgcacagtcatttcgcgatctttcaaaatgcgatcttcagactggataatatcggtcaggatctgcttaacctgatcgatatcggaatcatacgccacgccaataataaattcgttacggcgagctggctcgcgggagaagttaataatattcccggcaataattttaccgttcggaataacgataattttaccgtctgcagtacgcatggtggtggagaaaatctgcacactcagcacagtaccggctacgccgccgaggtcaacatattctccggcacggaacgggcggaacatgacaagtaacacgccagcggccaggttagacagtgacccctgcaaagccagaccaacagctaagcctgcggcaccgagtacagcaatgactgacgctgtttgtacgcccacgcgccccagtgcagcgattagcgtaaaggcgataattccgtaacggactaatgcagaaagaaaatcagcaacagtggcatcgattttacgggagatcatcaggcgattcaccgcgttggaaatcatccgcgcgataatcaaaccaacgatgatgatcgcgagtgccgccacgatgtttactgcataacttagcagcagcgcctggttagccaccagccagcttcccgcgccgtttatgctatcgacaacattcaaatcttccattcaatattccttttcaactgactcaaaatggagaaatacactccgccgccttatgacgggcagtctgacaagggtaaacaataaagcataattttgccaaatagatcacagatttctcatctgtatcaccttgcttttggcgaaaaaaagacccgcagagcgggccttgagataagcagaaaggaatatcttacagaacgtcgatcgcgttcagttcctggaatgctttttccagacgagcgatcatcgaagtctgaccggcacgcagccatacgcgcggatcgtagtatttcttgttcggctgatcttcgcctttcgggttgcccagctggccttgcaggtaagcttcgttttctttgtagtagttcagaacaccttcccaggttgcccattgggtatcggtatcgatgttcattttcactacgccgtagcttacggagtctttgatttcctgagcagtagaaccggaaccaccgtggaatacgaagttcaggctgttgtgcggcaggttgtgtttcttagaaacatattcctgagagtcgcgcaggatggtcggagtcagaacaacgttacccggcttgtaaactccgtgtacgttaccgaaggacgcagcgatggtgaaacgcgggctgattttgctcagctcggtgtatgcgtaatcaacgtcttccggctgggtgtacagtgcagaagcgtccatgtggctgttgtccacgccgtcttcttcaccaccggtgcaacccagttcgatttccagagtcatgccgattttggacatgcgctccaggtatttagagcagatttcaatgttctcttgcagagattcttcagacaggtcaatcatgtgagaagagaacagcggcttaccggtagcagcgaagtgtttttcacccgcgtccagcagaccgtcgatccacggcagcagtttcttcgcgcagtggtcggtgtgcaggataaccggaacaccataatgttcagccatctggtgaacgtgatgcgcaccagagatcgcacccaggatagcagcgccctgcggaacgtcagatttcacgcctttaccagcgataaaagaagcaccaccgttggagaactgaacgataaccggcgctttaactttagctgcggtttccagtacggcgttgatggagtcagtaccgacgcagtttactgctggcagtgcgaagttgttttcttttgctacctggaaaactttctgtacgtcatcaccagtgattacgccaggttttacgaaatcaaaaatcttagacatgtctcttgtcctgtatcgtcgggccttatactcgtcatacttcaagttgcatgtgctgcgtctgcgttcgctcaccccagtcacttacttatgtaagctcatgggattcactctcttgtcgccttcctgcaactcgaattatttagagtatgaaaaagtgcgtgctttaaaagcgcgctgcaacaagggcaggtttccctgccctgtgattttttacttcttagcgcgctcttcgagcatcgctactgcaggcagtactttaccttccacgaattcgaggaatgcgccgccgccagtggagatgtaggagattttgtcagcaatgccgaacaggtcgattgctgccagagtgtcgccgccgccagcgatggagaacgcttcgctgtctgcgatagcgttagccacgatttcagtacctttgcggaagttcgggaattcgaacacgccaaccggaccgttccacaaaatggttttcgcattcttcaggatttcagccagttcctgagcggaagcatcaccgatatccaggatctgctcgtcagctttcacatcgttaacagatttcagggtagccggtgcagtttcagagaactcggttgctacgcgaacatcagacggaaccgggatgttgcaggtggtcagcagacgtttagcttcgtcaaccaggtcagcttcgtacagggatttacccacatcgtggccttgtgctgcgataaaggtgttagcaataccaccaccaacgatcagctggtcagcgattttagacagggagtccagaacggtcagtttagtagatactttagaaccaccaacgatagccaccatcgggcgagcaggttctttcagtgctttacccagcgcgtccagttcagctgccagcagcgggcctgcgcacgcaacgtcagcgaatttaccgataccgtgagtagaagcctgcgcgcggtgagcagtaccgaatgcgtccattacgaacacgtcacacagtgcagcgtattttttggacagagtttcgtcatctttcttctcgcctttgttgaagcgaacgttttccagaacaaccagttcaccttcagcaacgtcaacgccgtcgaggtaatctttaaccagacgaaccgggttagacagtttgtctttcaggtagttaacaaccggcagcagagagaattcttcgttgtactcgccttcggtaggacgacccaggtgggaagttaccatcacttttgcgccttgtttcagggcaagttcgatggtcggcagagaagcacggatacgcgcgtcgctggttactttcccgtcttttactggtacgttcagatccgcacggataaatacacgtttcccagcaagatccagatcggtcatcttaattacagacatggtgaatcctctcgttgattctaaaagttttgcagacgctgcttgcgtcttacctgaaagcaacagtagccatagctaacgtcgtgtcgagcattcggttagcaaagccccattcgttatcgcaccagaccaacgttttgatcaggtgtgcgccactgacccgggtttgggtgccatcgacaatggcactgtgcggatcgtggttaaaatctacagagaccaacggcaattccgtatagtcaactataccatgaaatgcaccttgtgctgctttttgcagcaacaggttgacttcattggcttttacaggtttcttcaccgtcacgcttaaatcgattgccgtcacatttatggttggcacacgtaccgcaatcgcttcaaagcgatcgttaaattgcggaaaaaatcgtgtgataccggcggccagtttagtatcgaccggaatgatcgactggctggctgcccgggtgcgacgcaggtcaggatggtatgcatcaataacctgttgatcgtgcatggcggagtgaattgtggtcacagtgccggactcaataccgtacgcatcatctaacaatttgatgacgggaattatgcaattcgtggtacaggaagcgttagaaacgatgcggtgttccgcacgaagttgatcctgattgacgccgtaaacaacggtcgcgtcgagatcgttactgccaggatgtgaaaagagcacttttttggccccggcggcaatatgcgcttcgccatgctcacgggagccatatacgccggtgcagtcgaggactacatcaacgccaagttcacgccaggggagcgattgcagtgaacgttcatgcaatacgcggatggcgtcatcaccaacaaaaagttgatcgcgttcctgtcgtacttcccatgcaaaacggccatggctggtgtcatatttcaacaaatgcgccatgcccgcagcatccgccagttcgttgattgccaccacggtaatttccgcccggcgtccggattcatacaaagcacgaaccacattacgcccgatgcgaccgaagccatttatcgctacgcgtacggtcatagatctcctgcaaggttttccctgagcaaatttgccagacagagtaatccagcaaatcgttcggggaaaccttacctgtcgcaaactgcgactgattggttaattgtcgaacatttaatcgactgaaacgcttcagctaggataagcgaaacgtggaataaaaggaatgattgtccagtcaaagaagacaattatctgacttacgtcacgttttcagccccgcccctgtggaatttattccactttgcagaatcacgaataagcgtagcaaaatcttttcgttgtgccgtcacaaaccctgacttatatcagaatatgactgatgcagcgtcgatattatccgcaatacgtccgagtttcggagtactccaatgatgacattgccctacccatattcttcctccgcacgtttttacgcgctgcgcctgctccccgggcaggaagttctctcccaattacgcgccttcgcgcagcaacaacaactccacgccgcgtggattgcaggttgtaccggcagtctgactgacgtcgccttacgctatgccggacaagaaaacactgccctgctaagcggtaagttcgaagtcatcgcattgaacggcacgctggaacagagtggtgaacatcttcatctctgcgtttccgatccacacggcacgatgcttggcggtcatatgatgcccggctgtaccgtgcggaccacgcttgaactggtgatcggctgccttgaggaactggcgtttagccgccagtcttgcgcgctttctggttacgacgagttgcatatttccccccgttaaataactactttcagtgaggttttcttatggcgcgtcgccacttttccagtcaggcattggtgttgatcgttatctctatcgccatcaatatgatcggcgggcaactggccagcatggtcaaattacctatttttctcgactccatcggcacacttattagcgcggtactgcttggtccggtgatcgggatgctaaccggtttactgaccaatttactctggggattgctgaccgacccgatcgccgccgcatttgcgcccgtcgcgatggtcatcggcctggtcgccggttggctggcgcgagcgggttggtttcgcaccctgccaaaagtcgttgttagcggcgtgattattacgcttgcggtaacggtcgtcgctgtaccgctgcgtactgcgctgttcggcggcgtgacaggaagcggagccgatttgttcgttgcctggatgcactcgatggggcaaaacctggtggagtcggtggcgattacggtgataggcgcgaacctggtcgataaaattcttacagcggtgattgtctggcttttactgcgtcagctgccgattcgcaccacgcgccattttccggcaatggctgccgtgcgctaaatgcatccgtttacatccttaacgctgtgggcgctggcggcctgcaccacgcttatcctgcccacacagacaatattgccagtctatagcgcggcgacctttttctgccttattgcgccaaaggccacgcggcggcgggcaaaatatgtcgtctggctgatgttctcgctgggggctggactgtggctggtgcacggtgactggctgacagaatggctaagcggcacgccacgctctccagaacggtgggcgcatgctattacgctctggttgcggattctggcgattgtttcaacctcacagttgtggatgcagtacgtccccgtgcaacgttttatccgcgctttgtttgcttctcgcctgccgccgggcgtcgcttatctgtttgccgggccgttattggtcgttgagcagttaaaacggcaattggcgattattcatgaagcgcagcgcgcccgcggcgtgccgctggatgagggctggtatcagcgtttacgtgcgatgcccgcgttaattattccgctaacacacaatgcgctaaacgatcttgctgtccgtggtgcggcgctggatatgcgggcatttcgaatcaacaataggcgcactacgttatgggcaccagccgatagcaccctacaacgcgtagcacgttacgccatgatattgctaatgctggctgaattcggagcgtggatatggttacgttagaacagtttcgctattgcccgacacactcaacgcatcctccgttctgttatgactttcactatgtcaaaccggggatggtcgccatctttggtgacaacggcagtggcaaaagtacgctggcgcagctgatggcgggctggtatccggactttctaccaggagagataaccggcacggggacgcttctcggtacgcccattgggcgtctcccgtttaatgaacaatccgccaccatccagctcgtccagcaatcgccctatttgcagctctccggctgtacctttagcgtggaagaagaagttgcctttgggccagaaaatctgtgtcttgctgaaaaagagattatggcgcggattgacgccgccctggccctgaccgagtgccagccgttgcgccatcgtcacccggcaacactctccggtggagagacacagcgtgtggtcatcgcctgcgccaccgcgatgcagccaaagctcttaattcttgatgaagcctttagccgcctgacgccgcaggcccgcgaaatgctgttgcagcgcttacaacactgggcgcttgaacgtggttcgctgattattctttttgaacgtcatcacacacctttcctgaaccactgccagcaagcgtggcaattgcaaaacggagcgctccagccactatgttaacgttaaatcagatatcttatcgctggcctggcgcggcaacggattgtctttgcgacatttctctgcaactcaaacaaggtgaatggctggcgctgaccggcgacaatggcgcgggaaaatcgacgctgttacgagtaatggcaggtcttcttacgcccacagccggtacggttatgctgcaacaacaagcgatgaaaaacctgaaaaaccgccagcgcgcggcaaagattggcgtactgtttcaggaagcggaaaatcagctttttcacagcaccgttgctgacgaaatcgcatttggtttgatactgcaaaaatgcccggcggatgaaatcactcaacgtaccaatgctgccctgcaatgctgtcagttagcagacactgccagcgcgcatccgttagatctgcatagtgcgcagcgacggatggtcgccgtcgcctgcctggaagcactctctccgccactattgctactggacgagccgagtcgggattttgacgaaaattggttgagcgtgtttgaaagctggctggagaagtgccgccagcgaggcactagcgtcgtagcaatcagtcatgacgccgcatttacccggcgtcatttctctcgtgtggtgcgactggaagatggtgtaatcaggaacgttaatccatcagacgatattcacccgtagcggtcatcattaaggtcaaatttgcaggcagactctcttccagcacccggcgaacattcggcccgtcggtacggtcataaaaggcttctgcgtctgccagcgataaccctcccgccagcttgcgccccaccagacgctcccgcaacgcagatgcgggagctttgataaagatcgagaaatcacaaaattgcgcaagctggcaccacttttcatcatccagcaacaaccagtttccttcgacgatgacgagtggtgcggtaacgtgcagcgcatcttcaacaggatcatgcttttgtcgatcgtactgcggccacgtacaatccccttccacaacccggcacagattttccgccagtttcgcaacgtcaaatgtctctggtgcgcctttgaaggggcgcaattgatgcgcatccagccagctattgtaatggtgaaaaccatccatcggcagcgtctgaatagcgggcagttccgggtcttgttgcgcgagatattcccagaaggtggttagggtagatttacccgtccccggcggagcgcaaagaaaaaccaccgtacgccgctgcggatttactgtctgtaaggccgccagcatacgcagcaacggtttatgtacattttcaatctcttcgttctggtactgtgcctgtatcttcagcccattcaccgttaattcaattttcacggcgttaattcctttaaggttgtcgttactgccagcgtcagcgccgttttgaccatcccgctaaaacgcgcctctgaccagacggcgaaatcggcgaacttcatcgctttcaacgcgtcatagagcgtcgcattgcgggttatgctattgacgttgctgataaaatcccaggttatgtcatcagcaaatccgggcgtttcatcctgttcgttcaggtaatgccagaactgggaaaagtgcgtgatatcggcatacagccatttatccatcttccccagcgcataaatcaaacgcagcgcaacatcaatatcgtcaagcgggccgctttgggcgagtaacggcttcactgcatattcgacgatctcttcatcgttatcgacaaacagcgacggcagaaactggcgtatcccctggagcaaaatagaatgcgcagttttcataaatgaaaataaattgtcctgtgcatccagttgctcaagcacatcatcttctgtcagcgtcgccattggtcttccgatagatcaccatcaatgcagggagtctattatattacacgtttggtccgcgccgccgatcagtaatgtctgcgtccgcaccccattcgccgtctgttggataccgttcaccaactcgccgcccgtcacgcccgtagcgctaaagaggatatcgttccccctcgccgataaccactcgcccacgaaaagcaacgtcgtttaatgcctggcgcatcgcggtgaccgcaaggccatcaattttatttttgtcgccacagccggtttgcggccaggcagccaacgctgcctgttccgtaacgcgaaataatggccacgccagggacatcattgcgcggcctccccaatatcaacgccaaattgtgccagcagatatttctcggcctgttcattccagataccgtgcgttttctcaaccagccgcgccagctctttaaacagcggatcggttttgcctttttcggcaaaatcggcaatggcggtcagcggcatggtcacgccgttataaatgagttttttaccgccagggatatccggcagattgagcacggtttctggcaccgcatccaggccaccgatatgggtcaccataaacgacggctgtaactgccccgtggcgctaagggcaatcgcctctttcatgtcgtccgtggaaccgccggacgtgccgacaacgtgcgtactgttgtaatggacgttgtagaaattaaacggcactttgaagtttttatctgtcggcccggcgaagaaattcagacaaccatcctccgccagcaattcatccgccatttcaacaacagcaggcaccgccgcataaacaaaaatgtcatcgaacccggcatctcctgtcagcgcccgcagcgtctggaccggatcgctcacccctttggtattcatatacaccagctcaatgcctttactggccgccagttccaccggcagcagcttttgtacctgcgtcaggcgtttgtcgtcgatatcgactaccaccacccgcgacggttgtatgccgccgttaatagcgtaatcgatagcgccaattcccatcgggcctgcacacgccagtagcgcaatattgccgccaggtttgacgcccatgcgatgctcataaacatattgcgtggtgtgataattggcatgataagcgccaataatgcagcacataggctctgccagcgacgccgcagcaaaataagagccgtgatagggtaatacgcagcccaaattaatggcgatttcgggaataatcatataggtggcgttaccgccaaaatattcgtagctgtagcccgctgaatacccgcctggtaaccccatcgccggttgcaatacaaaacgctggccttttttatatttgccagtgagatttttacccacttcgacaataaccccggcacattcatgcccggtaatgaccggatgattttctaaatcgtcggggacgcgtttatgttcactaccgagtaacgccgctttccaggtggataaacaaacgctgtcagaaattacattcactaacagttcattatcggtaatttctggcagctcaaattcgcgcagacggacatcccgcttgccataaatagcagcaactttggttttcatttttacctctgtaatcagtgtttatgttcagcggttaattgattaaataaagtgtcgagttttggatcgccaatatagttattaatcaatatcagtggtttatccgtcacacgtttcacgcgcccttccagactggcgtgagtaacgacgatatccgcatccgcaggcacgttttctatggcgtaatgttttacttcaattgccagccccgctttttccagacgtttacggaaggtggttgcgcccatcgcgctggagcccatccccgcatcgcaaacaaaggcgatacgcttaacccggcttaacgagaatgccccctcttgtttcatcgccttaaccgcattggctgactgagcaaactcatcttcgctctccgtttccaccgttttttccatcttcagtatcagcgaagtgatagcaaaggacaccagggtacctaccgtaacaccggcaattgtcgccaggaacgagcctttcggcgtcagtgccaggtaagcaaagatagaccccggacttgggccagccaccagaccaccgtccagtaagttaaacatccaggtgccagacataccgcccgcaatcatggcaataatggtcagcggcttcatcagcacatacgggaaatacagttcgtggatcccaccgaggaagtgaataatcatcgccccgggcgcagaacgtttactcatccctttaccaaacaaggtaaacgccagcagcagccccagaccaggacctggattggaggccaccatgaagaagatggatttaccgttaaccgaagcctgttgcattcccagcggataatagacgccctgatcgatcgcattattaaggaaaagcactttcgccggttcattgatgactgacagcaaaggtagataacccgcatgtaccagcgcctcaatacactctttgacgaaagtattagcaattaacaccgccgggccgataacttcaaaacccagcagacaaaggagcatccccgcgatacctaatgagaagttattgataaccatctcaaaaccagcaggtatgcgtttttccagcgacttgtcgatatatttaatcaccagaccaccgagcggccccataatcattgagccaaggaacatcgggatttcagcgccgacgatcacaccaatcgtaccaattccgcccatgaccgcgccgcgtttaccgccgaccagatgaccaccggtagaaccaatcatcacgggcaataaataggtaatcatcggaccaacaattttggcgaaatgttcattcggcagccagccggtgggaataaataatgccgttataaatccccaggcaataaaagcaccgatattggggatgaccattgcagtcaaaaagcccccaaaagcctggacctttgcacgagcagacttgttttccataatattatcctgtagaggagagagtaattatccgcggctgataatgtccgctaattgtttttctgatgatgcggttaagagttgttcgagtatttcttcttcgcacagtaattcacttaacgcctgaatagcgccaatgtgcgaattggcatcggcagcagaaagcccgatgagtaatttaatcggttcgtcattccccggaaaataaacgctttgtttaagtaacgtcaaagacatcccggttttaagcgccccacattccgatcgcgcatgaggcattgccacgcctggtgcgagaatataataagggccattgttaatggtggaacctttaattgcctgaatgtaattctcgctgatatagtttttatccagcaatgataccatcgagaaatcgatagcttcctgccaatcttttgctgaatgtataactgagattgatgattttggaaaataatcaataagccgcataaattatccttattttatttttagggtacagtccggcggtaaaaataaaatacgcgtacaaattaacgaaagcaattggacacatgaaaggagaaactccacgagcaaaaataacaaaatattgaataacaacaacatgaaataagcttttaaaaagtcaattataaatctgttaagtaaactacaaaatcaacaaattattcatcactatatttgtgatacacatctctattttcttattgaatgctcgaaaacatacttattacgtttattattttttcgctcatcccctttataaattctgaattatcggctgttgtctgttttctcatcacctcatgtgacatattccccactttactcaaggaagattcatatgaaagcacctgtttcattaacctcatttcgcccacaaaaatctcttgctatcgccattggcgtgcttgccgtggttgtgctgccatttctctcgtattacaccgttaatgaaggtgaacgcggcattttgctgcgctacggaaaaatcgtaaaagttgccgagccggggctgggttttaagatcccttttatggaaagcgtagagaaaatttccacgcgtaatcaggctgtggtctatcagggattacaggcctacagccgcgaccagcaaccggcacaaatgacagtatcagtcagcttccacattaaaccttcagaagcaggcgcggtttataccacctacaacaccattgaagcattaaaagatcgtctgattgtccgtcagttgccaactcaactggagaacgttttcggacaatataccgccatcagcgccgtacaggatcgtacaaaactggttcaggatctgcaaaatgccatgcgcaaagccgttgttgggccagtggtaattgacggggtccagattgaaaatattgatttttctgacgcttatgaaaagtcgattgaagaccgaatgaaagcagaagtcgccattgccacgcgtaagcaaaatctggaaacggagaaaatccaggcgcaaatagcggtaactcaggcccaggcggaagcagacagtaaactagcggcagccaaagcagaagcggaaactattcgcgtaagaggcgcggcagaggctgaaactattcgtttaaaaagtgcggctgaagcagaagctatccgcctgcgcggtgaagctctgcgggagaatcccggacttgttgccctcaccactgctgagcgttgggacggtaaactgcccgataccatgatccccggcagcacagttccgtttatctctactaagtaaaaaagggccgctttcgcggcccttgagactgatagcaaagacaaaactgcctgatgcgctacgcttatcaggcctacatacttcctgcaatatgttgaatttgcaaaatcttgtaggacggataaggcgttcacgccgcatccggcataaacaacgcgcactttgccaacaatctgaagggccgcatttgcggcccttctcacaaagcatcttaccgattacagcagcgcttttgctttcgcaacaacgttgtcaacggtgaagccgaactcttcaaacagctgctctgccggagcagattcaccgaaggtggtcatgccgacgatagcaccgttcaggccaacatacttgtaccagtagtcagcaatgccagcttccaccgcaacacgagcggtaaccgctttcggcagtacggattcacggtaagccgcgtcctgcttgtcgaatgcgtcggtagacggcatggaaaccacgcgcgctttcacgccttcggcagtcagtttttcgtaggcggcaacagccagttcaacttcagaaccggtcgcgatgaagatcagttccggctgaccagcacagtctttcagcacataaccaccgcgcgcgatgtttgccagctgctcttcagtacgttcctgctgcgccaggttctgacgggagaggataagcgcagtcgggccgtcctgacgctcaacgccgtatttccacgctactgcggattcaacctggtcacacggacgccatgtagacatgttcggggtcacgcgcagagaagcgatctgttctaccggctggtgagtcgggccatcttcgcccagaccgatggagtcgtgggtgtaaaccatcacctgacgctgtttcatcagcgcagccatacgtacggcattacgtgcgtattccacgaacatcaggaaggttgaggtatacggcaggaaaccaccgtgcagggagataccgttggcaatcgcagtcataccgaattcacgtacaccgtagtggatgtagttacccgcagcatcttcgttgattgctttagaaccagaccacagggtcaggttagacggcgccaggtctgcagaaccgccgaggaattccggcaacagcggcccgaacgcttcgatagcattctgagacgctttacggctggcgatcttcgccggattagcctgaagtttagcgatgaactctttcgctttggcgtcgaagtcagacggcatttcgcctttcatacggcgggtaaattcagcagcttcctgcggataagctttcgcgtaagcagcgaatttctcgttccatgcgaattctttcgcctggcctgcttctttcgcatcccactgagcatagatttcagacgggatttcgaacggcgcgtatttccagcccagctgttcgcgggtcagggcaatttcagcgtcgcccagcggcgcaccgtgggagtcgtgggtaccggctttgttcggggaaccgaaaccgatgatggttttgcacatcagcagggacggtttgtcagtcactgcgcgcgcttcttctactgcgcgtttgatggatgccgcgtcatgaccgtcgatatcgcgaataacgtgccagccgtaagcttcgaaacgcattgcggtgtcgtcggtaaaccagccttcaacgtgaccatcgatagaaataccgttgtcatcgtagaacgcaatcagtttacccagcttcagcgtacccgccagagagcaaacttcgtgggagatgccttccatcatgcagccgtcgcccatgaaggcgtaggtgtagtggtcgacgatgtcgtggcccggacggttaaactgcgccgccagcgttttttctgcaatcgccataccgactgcgttggcaataccctgacccagcggaccggtggtggtttctacacctgcggtgtaacccacttccgggtgacccggagttttagagtgcagctgacggaagtttttcagttcttccatcggcagatcgtaaccggtgaggtgcagcaggctgtagatcagcatggagccgtggccgttggacagcacgaagcggtcacggtcagcccaggacggattctgcgggttgtgtttcaggaaatcacgccacaggacttcggcaatgtcagccatacccataggggcacccgggtgaccggatttggctttctgtactgcgtccatgctcagcgcacgaatagcattggcaagctctttacgtgaggacattttgactccagatcggatgatgaagggcacgcccttaacgacttgacgacagcgcgttttgggctacgccggaaaatttgccaacaatttaccgcaagccgctcgtcatgtacatggaacatccttttgccgcttcagaaatctctggatcatgctcgcatgttgcgcaatccactcgcccgtccgctgcgcttttccttatactgagactgagcgtcgattcacctgcaaacggcgcatttttagaataatcctgaccttgtgcggaagagaaaacatgaaaattcgcgccttattggtagcaatgagcgtggctacggtgctgaccggttgccagaatatggactccagtggactgctctcatcaggagcggaagcttttcaggcttacagtttgagtgatgcgcaggtgaaaaaactgagcgatcaggcatgccaggagatggacagcaaagcgacgattgcgccagccaatagcgaatatgctagacgtctgacgacaatttctcgcgcgttaggcgataacatcaacggtcagccggtgaattacaaagtgtatatggcgaaggatgtgaacgcctttgcaatggctaacggctgtatccgcgtctatagcgggctgatggatatgatgacggataacgaagtcgaagcggtgctcggtcacgaaatggggcacgtggcattaggccatgtgaagaaaggaatgcaggtagcacttggtacaaacgcaattcgcgttgcggcggcctctgcaggcggaattgtcggcagtttgtcacaatcacaactgggagacctgggcgaaaagctagtcaattcgcaatttacccaacgtcaggaatcagaggccgatgattactcctacgatttgctgcgccaacgcggtatcagcccggcaggtcttgccaccagctttgaaaaactggcgaaactggaagaaggccgccaaagctcaatgtttgacgaccatcctgcatccgccgaacgcgcccagcatattcgcgatcgtatgagcgcggatggagttaagtaaagccaggtagtgccgaacgtaggtcggataaggcgttcacgccgcatctgacaagaatggcacatttgttactccgtgcgcattgccggatgcgatgctggcgtatcttatccggcctacgggtgccgagtgtaggtcggataaggcgttcacgccgcatccgacattaatggcacatcacccgcgcgcctcttatctggcgcttactcgccctttttcgccgcctggatatacagcatctccagcgccagcgtcgccgcagccagagcggtgatttccgactgatcgtatgccggagccacctccactacgtccatcccaacgatgttgagatctttcaagccgcgtaccagtttaatggcgcgatcggaggtcaggccgccaattaccggcgtaccggtgcctggtgcaaaagcaggatccaggcagtcgatatcaaaggtcaggtaaaccggcatatcacccacaatctgtttcacctgggcgataatgtcatccacgctgcgatcgttcacctggcaggcgtccagcacggtaaagccgttgtctttatcaaactcggtacgaataccaatctgcacagaatgattcgggtcgatcagaccttctttcggcgcggtatagaacatggtgccgtggtcaaattcacaaccgttagcgtaggtatcggtgtgggcatcaaagtgtaccaacgccattttgccgaaatgcttcgcatgagcgcgcagcagcggcagcgtaacaaagtggtcaccaccgaaggagagcatacgcttaccggcagccagcagcttctcggcgtgcgcctgcagcttctcgctcatctcacgggcatctccgaaggcatataccagatcgccgcagtccacgacgttcaggcgctcacgcatgtcgaaattccacgggaagcgattgtgttcccaggccagattcgtcgaaacctgacggatcgctgccggaccgtggcgaccacccgcacgaccagaagtggccatatcgaacggcacgccagtaatcacccagtcagcatcgctgtcatatggctggaagttcatcggcaggcgtaaaaaaccaaaggcgttggaaaccagtgagttatcgtattgatgacctaaggtgctcatggatggactcctattacaaagtcgatataaaaaaacccttccgcgtcgttaggcccgacgaggaagggttggatttgtgaaacacaagtttgtgctaattatcgccttaaatgggcgaggcatcaagcgaggttgctatttccgacacggtggcggcgcatagccattgttatctgccggaaaggcttgtccagagcacggcggcagcgcgtttttcgccgggccttgtaattcaaaggcggcaaagccgattacaccggtattacgcacatcgccttgcgccgaattggctgcgtaggaatcagcaacgttggcgaactgaaaagccgcttcggtatgtttatctttgcggaatcctttaatcgctaacgaatctccggcattcacaatataaccgttgttattcagcgaaccttgcttgccgttcagcacatccaggccatcaaccgtagcaacgatctcgtagttggtgttacgactgtaattacggacatataattgataattcattccgactctggcatggacaatatagcgtggttcattattggatgaatcataaacccgcgtaataggtagagaattaaaattaccatcgcgaatagcatattccagttcgttaatacgaatgctataaacgcggtcgtagccggaaggaacattagtcgaataactaataacgatcatctctgccggatcgcgccaggctcgttcagcagatacgccctgaaccgttgagtgcacatccccaccccaggcggtgccgacattgcctgatgcactgctattatactgcgcattactggaacaaccagccagcagcacgattaatgccaccaacgcgctacgtactttccattttttcataaccgttccctctgcatttaattaatgcagcgattgtagggagattatttaataagaaaagcagctaaattatttttaagaatatataaaaagaaagcgggccgatttacgtaaataaatcgccccgccagcagaataatcttaattattcatcttcaagataggtataaccgtacaaacctgcctcgaactcttccaggaactgttgttgcagttcagcatcaagatcggttttcttcacctgatcgcggaactgagttaacagcgttttcggatcgagctgcacatattgcagcatgtccgccacggtatcgccttcgtcagacagttctacctctacgctaccatcagggaagacgaacacgtcaaccgcttcggtatcaccgaacaggttgtgcatgttgccgaggatctcctgatatgcgccgaccataaagaaaccgagcatcggcggattctccggatcgtactccggcataggcattgtcgtggcaataccgtcaccatcaatatagtggtcgatagcaccgtctgagtcacaggtaatatccagcagcacagcgcggcgttccggcacttgatccagcccttccagcggcagaaccgggaacaactggtcgatcccccacgcatccggcatcgactggaacagcgagaagttgacgtacattttgtccgccatacgttcctgcagctcgtcgataatcggacgatgagcacggttttgcggatccagctgcttttgcacttcatggcacatgctcaaataaagctgctcagcccatgcgcgttcttgcaggctaaaggtgccggaagagtagccgatatgaatgtcgtgcagatccatctggctgtcgtgtaaccattcacgcagagaacggcgagttcccggttcgtgcatttcctgccaggtttcccacatgctttgcagggcgcgcggtgcatcttctgcaggcgcggtcggcaccgtgtattcgttacgttccacgccgatgatattcgacaccagcacggtgtgatgcgcagtcaccgcacgacccgattcggtgattaccgtcggatgtggcagaccattttcttcacacgcatcaccaatcgcccagatgatgttgttggcgtattcattgaggccgtagtttacggagcagtcagactgagaacgggtgccttcatagtccacgcccagaccgccgccgacgtcgaagcactgaatattgacgcccagcttgtgcagttccacatagaaacgcgcggattcacgaacgcctgtcgcgatatcgcgaatattcgccatctgcgaaccgaggtggaagtgcagcagttgcaggctgtcgagacgcccggcttcacgcagcgtttcaaccagttgcagtacttgagtcgccgccaggccaaacttcgatttttccccgccggaggactgccatttacccgagccctgcgaagccagacgtgcacgcacgcccagacgaggaacgacattcagacgttctgcttcatccagcacaatggcaatttctgacatcttctcaatgaccagatagaccttgtggcccatcttctcgccaattaatgccaggcggatatattcgcggtccttataaccgttgcagacgatgacgctacgggtcatgccagcatgtgccagcaccgccatcaactcggctttggaaccggcttccaggcccagcggttcgcccgaatgaatcagggactcaatcacgcggcggtgctggttaactttgatcggataaacgaggaagtaatcgccgttatagccgtaggattcccgcgctcgtttgaacgcggcgttaatggaacgcaaacggtgctgcaggatctgtgggaaacagaacagtgcaggcagacgctgaccctgtgcttcgcgagttttcactaactgcgcgagatcgacgcgagcttccgggacgtccgggtccgggcacacgctgatgtggcccagctcgttaacgtcatagtagttattgccccaccaggcaatattgtaagtacgcagcatcttgctggcttcctgggagctcattgcaacctcctgcatggagcgtagtacaccgtgttcgcccgctgacgaaggcaaacccatagacatgtcgtcagacatagcgaacctcaaattattttattaagtgtaaaacagttaacgactatcgcagcctggaactgcgataacaacccataagcacatggattttccagcagtgaatgctgacgctccaactgcgcaaccggtttctttttcataacattattaagcacataaccgaacgtaagtgtgacagttcggcgaaaccacgagaaaactcttgtttttacaagagcgcccttgttcagtcctcagtagctgtaaccagctcttgaatcctgagaagcgccgagatgggtataacatcggcaggtatgcaaagcagagatgcagagtgcggggaacgaatcttcaccagaacggtgagacaggttaagcagcagacaacggttcattatttcgtatcacctccacggccgcctgttaagacgaacccacaagccaaaactctgttttcaacccggctggaagtggcaacacgaaagaaacgtcgtgtgctttttatttaagccgcgcgccgcgttttataccccacaatggcagaaaattgcaaaagataaatacgcagaatgccagcattgtcaggaaaaatttccagccacgtttttaacagaatgagacacgattcaaaaaaaagtggaaattgggtgaagaactgacctaaaatagccatccagatgttaatccatccataccgattaacactcagactgccagtgtttttaacctgcagagtcgtggtaggatccgctaccacagaaaatccacacaacagtttgagctaaccaaattctctttaggtgatattaaatatggcaaaacacctttttacgtccgagtccgtctctgaagggcatcctgacaaaattgctgaccaaatctctgatgccgttttagacgcgatcctcgaacaggatccgaaagcacgcgttgcttgcgaaacctacgtaaaaaccggcatggttttagttggcggcgaaatcaccaccagcgcctgggtagacatcgaagagatcacccgtaataccgttcgcgaaattggctatgtgcattccgacatgggctttgacgctaactcctgtgcggttctgagcgccatcggtaaacagtctcctgacatcaaccagggcgttgaccgtgccgatccgctggaacagggcgcgggcgaccaggggctgatgtttggctacgcaactaatgaaaccgacgtgctgatgccagcacctatcacttatgcacaccgtctggtacagcgtcaggctgaagtgcgtaaaaacggcactctgccgtggctgcgcccggacgcgaaaagccaggtgactttccagtatgacgacggcaaaatcgttggcattgatgctgtcgtgctttccactcagcactctgaagagatcgaccagaaatcgctgcaagaagcggtaatggaagagatcatcaagccgattctgcccgctgaatggctgacttctgccaccaaattcttcatcaacccgaccggtcgtttcgttatcggtggcccgatgggtgactgcggtctgactggtcgtaaaatcatcgttgatacctacggcggcatggcgcgtcatggtggcggtgcgttctccggtaaagatccatcaaaagtggaccgttccgcagcctacgcagcacgttatgtcgcgaaaaacattgttgctgctggcctggccgatcgttgtgaaattcaggtttcctacgcaatcggcgtggctgaaccgacttccatcatggtagaaactttcggtactgagaaagtgccttctgaacaactgactctgctggtacgtgaattcttcgacctgcgcccatacggtctgattcagatgctggatctgctgcacccgatctacaaagaaaccgcagcatacggtcactttggtcgtgaacatttcccgtgggaaaaaaccgacaaagcgcagctgctgcgtgatgctgccggtctgaagtaatctttcttcacctgctttcaaaggccagcctcgcgctggcctttttcttttacctcaccgcagtggacaggcgttcacgccgcatccggcaaaaaaccgcccgcacaataacatcattcttcctcaacacgttttaccgcaaattatcatcactactgaaatcgattacaccaaccacaccagccaaatatttgtaatattttcatattattattcagctttcacagttgttacatttcttttcagtaaagtcttaattgcagataacaacctttaatctatgatgatataactcaattattttcatgcacttaaatcataactaagataaatgttagtgtaagcgattacactgatgtgatttgcttcacatctttttacgtcgtactcacctatcttaattcacaataaaaaataaccatattggagggcatcatgcctgacgctaaaaaacaggggcggtcaaacaaggcaatgacgtttttcgtctgcttccttgccgctctggcgggattactctttggcctggatatcggtgtaattgctggcgcactgccgtttattgcagatgaattccagattacttcgcacacgcaagaatgggtcgtaagctccatgatgttcggtgcggcagtcggtgcggtgggcagcggctggctctcctttaaactcgggcgcaaaaagagcctgatgatcggcgcaatcctgtttgttgccggttcactgttctctgcggctgcgccaaacgttgaagtactgattctttcccgcgttctgctggggctggcggtgggtgtggcctcttataccgcaccactgtacctgtcagaaattgcgccggaaaaaattcgcggcagtatgatctcgatgtatcagttgatgatcactatcgggatcctcggcgcttatctttctgataccgccttcagctacaccggtgcatggcgctggatgctgggtgtgattatcatcccggcaattttgctgctgattggtgtcttcttcctgccagacagcccacgttggtttgccgccaaacgccgttttgttgatgccgaacgcgtgctgctacgcctgcgtgacaccagcgcggaagcgaaacgcgaactggatgaaatccgtgaaagtttgcaggttaaacagagtggctgggcgctgtttaaagagaatagcaacttccgccgcgcggtgttccttggcgtactattgcaggtaatgcagcaattcaccgggatgaacgtcatcatgtattacgcgccgaaaatcttcgaactggcgggttataccaacaccaccgagcaaatgtgggggacagtgattgtcggcctgaccaacgtacttgccacctttatcgcaatcggccttgttgaccgctggggacgtaaaccaacgctaacgctgggcttcctggtgatggctgctggtatgggcgtactcggtacaatgatgcatatcggtatccactctccgtcggcgcagtatttcgccatcgccatgctgctgatgtttattgtcggttttgccatgagtgccggtccgctgatttgggtactgtgctccgaaattcagccgctgaaaggccgcgattttggcatcacctgctccactgccaccaactggattgccaacatgatcgttggcgcaacgttcctgaccatgctcaacacgctgggtaacgccaacaccttctgggtgtatgctgctctgaacgtactgtttatcctgctgacattgtggctggtaccggaaaccaaacacgtttcgctggaacatattgaacgtaatctgatgaaaggtcgtaaactgcgcgaaatcggcgctcacgattaatctcctcaggcttcctcccatcatggaggaagccacctcttgcagtcatcttttcttcgctctatcctctgccgctatgaaaacatcccgtctccctatcgccatccaacaggccgttatgcgtcgcctgcgggaaaaactcgcccaggccaacctgaagctagggcgtaactacccggagccaaaactctcttacacccagcgcggaacctctgccggaacagcctggctggaaagctatgaaattcgtctcaatcccgttttgctgttggaaaacagtgaagcctttattgaagaagtggtgccgcacgaactggcacatttgctggtatggaaacatttcggccgcgtagcgccacatggcaaagagtggaagtggatgatggaaagcgtgctgggcgttcccgcccgtcgtacgcatcagttcgaactgcaatccgtgcgccgcaacaccttcccctaccgctgcaagtgccaggagcatcagcttaccgtacgccgtcataatcgcgtagttcgtggcgaagccgtctatcgctgtgttcactgcggcgaacagctggttgcgaaataaccacctgaactatcaggaactttcctgatctggctgattgcataccaaaacaactttcgctacgttgctggctcgttttaacacggagtaagtgatgtaccgttatttgtctattgctgcggtggtactgagcacagcattttccggcccggcattggccgaaggtatcaatagtttttctcaagcgaaagccgcggcggtaaaagtccacgctgacgcgcccggtacgttttattgcggatgtaaaattaactggcagggcaaaaaaggcgttgttgatctgcaatcgtgcggctatcaggtgcgaaaaaatgaaaaccgtgccagccgcgtagagtgggaacacgtcgttcctgcctggcaattcggtcaccagcgccagtgctggcaggacggtggacgtaaaaattgcgccaaagatccggtctatcgcaagatggaaagcgatatgcataacctgcagccgtcagtcggtgaggtgaatggcgatcgcggcaactttatgtacagccagtggaatggcggtgaaggccagtacggtcaatgcgccatgaaggtcgatttcaaagaaaaagttgccgaaccaccagcgcgtgcacgcggtgccattgcgcgcacctacttctatatgcgtgaccaatacaacctgacactctctcgtcagcaaacgcagctgttcaacgcatgggacaagatgtatccagttaccgactgggagtgcgagcgtgatgaacgcatcgcgaaggtgcagggcaatcataacccgtatgtgcaacgcgcttgccaggcgcgaaagagctaacctacactagcgggattctttttgttaacccctaccccacgcgtacaaccgcgtggggagacgacgcggatttttaactatgcgtatcccccgcatttatcatcctgaaccactgaccagccattctcacatcgcgctttgcgaagatgccgccaaccatatcgggcgcgtactgcgtatggggccgggacaggcgctgcaattgtttgacggcagcaaccaggtctttgacgccgaaattaccagcgccagcaaaaaaagcgtggaagtgaaggtgctggaaggccagatcgacgatcgcgaatctccgctgcatattcacctcggtcaggtgatgtcgcgtggtgaaaaaatggaatttactatccagaaatcgatcgaactcggtgtaagcctcattacgccacttttttctgagcgctgcggcgttaaactggatagtgaacgtctgaacaagaagctccagcagtggcagaagattgcaattgctgcctgtgagcagtgtggccgtaaccgggtgccggaaatccgtccagcgatggatctggaagcctggtgtgcagagcaggatgaaggactgaaactgaatcttcacccgcgcgccagtaacagcatcaatacgttgccgttaccggtcgaacgcgtccgcctgctgattggcccggaaggcggtttatcggcagatgaaattgccatgactgcccgctatcaatttactgatatcctgttgggacctcgcgttttgcgtactgagacaactgcgctcaccgccattaccgcgctacaagtgcgttttggcgatttgggctaacggagaagaataatgatcaagctcggcatcgtgatggaccccatcgcaaacatcaacatcaagaaagattccagtttcgctatgttgctggaagcacagcgtcgtggttacgaacttcactatatggagatggccgatctctatttgatcaatggtgaggctcgcgctcgtacccgtactttgagcgtcgaacagaactacgataaatggtacgagttcacgggtgagcaggatctgccgctggccgatctcgatgtgatcctgatgcgtaaagacccgccgtttgataccgagtttatctactcgacctatattctggaacgtgccgaagataaagggacgctgatcgttaacaagccgcagagcctgcgcgattgtaacgaaaaactgttcactgcctggttctctgacttaacaccagaaacgctggtcacacgcaataaagcgcagctaaaagctttctgggaaaaacacagcgacatcattcttaagccgctggacggtatgggcggcgcgtcgattttccgcgtgaaagaaggtgatccaaacctcggcgtgattgccgaaaccctgactgagcatggcactcgctactgcatggcgcaaaattacctgccagccattaaagatggcgacaaacgcgtgctggtagtggatggcgagccggtgccgtattgcctggcgcgtattccgcaggggggcgaaacccgtggcaatctggctgccggtggtcgcggtgaacctcgtccgctgacggaaagtgactggaaaatcgcccgtcagattgggccgacgctgaaagaaaaagggctgatttttgttggtctggatatcatcggcgaccgtctgactgaaattaacgtcaccagcccaacctgtattcgtgagattgaagcagagtttccggtgtcgattaccggaatgttaatggatgccatcgaagcacgtttacagcagcagtaacccaccttagcgagaaggatctcgttgagactctgagtgacagcgcccttctttccacgcatactgggcgctgttgcttttttgaaccaggaaacagaacctctgacaatgaatttacagcatcactttcttattgccatgcctgctctccaggatccgattttccgtcgttccgtggtctacatttgcgaacataataccaatggtgcaatggggatcatcgtcaacaagccgctggaaaatctcaaaattgaagggattctggaaaagctgaagatcacgccggagccgcgtgatgaatcaatccgtctggataaaccggttatgctcggcggtccgctggctgaagatcgcgggtttattttgcatactccgccttccaattttgcttccagcattcgcatttcagacaacacagtgatgaccacttcccgcgatgtgctggaaacgctcggcaccgataaacaaccgtctgacgtattggtggctctgggttatgcctcctgggagaaaggtcaactggaacaagaaattctcgataacgcgtggctaacggccccggcagatctgaatattctgttcaaaacgccgattgccgaccgctggcgcgaggcggcaaaactgattggtgtggatattctcaccatgcctggtgtggcaggacacgcctgatgagtggaaccttactcgccttcgacttcggcaccaaaagcattggcgtagcggtcggccaacgcattaccggcaccgctcgccctttgcctgcaattaaagcgcaggacggtacgccggactggaacattatcgagcgtttactgaaagagtggcagccggacgaaatcatcgtcggtttgccgctgaatatggacggcaccgaacagccgttaaccgccagagcgcgtaaatttgccaaccgtattcatggtcgtttcggtgttgaagtaaagctccatgacgagcgtcttagcaccgtggaggcacgttccggtctgtttgaacagggcggctatcgggcgctcaacaaaggcaaagtcgactctgcctctgcggttattattctcgaaagctatttcgagcagggatattaaggcgatttactagcgcacagatttctgacaatgtgctcgttgtttcatgttggatgcggcgtaaacgccttatccaacctacagtgagtgcgaattcaaagttacgcttcccttgtaggcccgataagcttgcgcatcgggcatatttacaattcgtatcagacacagcaacgtcacaagcgcccttctttcacccgctgctgataactctgctgaaacgttatcatccccacctgctgcccggtttgaataacatgcggtaactggtgggttttcccttcacgaatcaaattccccaccgcgggtgtgttaatcagtaattcaaacagcgccacgcgtccttcctgtttatccacttccagcttttgtgacaacaccgcccgtaaactacctgccagttgattacgcacgggatctttttcctgcgccggaaacgaatccaccagtcgctcaactgcctgcgctgcgccgcgcgtgtgtaatgtcgccagcaccagatgcccggtttctgccgccgtcagcgccagacggattgtctcgctatcacgcagctctccgagcaaaatcacatcaggatcttcccgcaatgcagcccgcaatcccgatgcgaaagtcatacagtgcaaaccaatctcccgctgttggatcaaacatcgctgactggtatagagatattccacaggatcttccagcgtcagaatatgcgcatcggcatgttgattgagatagccaaccatcgccgccagcgtggtagatttgccgctccccgtcgcccccgtcaccagaatcaggccattctcgctcttgagtaattccggcaataccggtggcgcaccaagctgttcgagctgtggacagtgcgaaggtaacaaccgtaatgccagagaaataccttgccgttgcgcgaacgcactgccacgcaaccgctggttttccgccagcgacacagcaaaatccaactgaccattctccagcaatattgtccgctgatcgtcatccagccactcccgcagtagctcttcgacgtccagcgcatcaaacggcgcagcttccattcgcccgcgaatgcgccatcgtgcgggccaggcgctgcacaggtgtagatccgagacgttatgctttacactaagggccacaatttcttccatattcatactaagatcctcggaaaatgaacgatattgcgcataacctggcacaggtccgggacaaaatctcagcggctgcaacgcgttgcggccgttctccagaagaaattacgctgcttgcagtcagtaaaacaaaacctgcgagcgccatcgcagaagccattgatgccgggcagcgtcaatttggtgaaaactacgttcaggaaggggtagataaaattcgccactttcaggaactgggcgtaacaggattagaatggcattttattggcccgttgcagtctaataaaagccgcctggtggcagagcatttcgactggtgtcataccatcgaccgtttgcgcatcgctacccgtctgaacgaccagcgcccggcagaacttccccctcttaacgtactgattcaaattaacattagtgatgaaaacagtaagtccgggattcaactggctgaactggacgagctggcagctgcggtcgctgaactaccgcgtttacgtctgcgcgggctgatggcaatccctgcgcctgagtcagaatatgtaaggcagtttgaagttgcacgccaaatggctgtagcatttgccggactgaaaacgcgctacccgcatatcgacacgctctctctgggaatgtcggacgatatggaagccgccattgcggcaggtagcacgatggttcgtatcggcactgcaatttttggtgcgcgtgattactctaaaaaataaggaattaaaggaacgccatgaatacgttgactttcctgctttcaacggtcattgagctgtataccatggtgctgttattacgcatctggatgcagtgggctcattgtgatttttacaaccccttctcacagtttgtagtgaaggtaacgcagccgattatcgggccactgcgccgcgttattccggcaatgggccccattgatagcgcctcgctgctggttgcctatattctcagtttcattaaagccatcgtgctgtttaaagtggtgaccttcctgccaatcatttggattgccggtttattgattctgctgaaaaccatcggcctgctgattttctgggtcctgctggtgatggcgattatgagctgggtaagccagggtcgtagcccgattgaatacgtgctgattcagctggccgatccgctgctgcgcccgattcgccgcttgctaccggcaatgggtgggattgatttctcgccgatgatcctcgttctgctgctgtatgtcatcaatatgggtgtcgcagaagtcttgcaggcgaccggaaatatgctgctgccggggctgtggatggcgttatgagtgccgtaacagttaatgatgacggtctggttttacggctctatattcagccgaaagccagccgtgattctattgtcggtttacatggcgacgaggtaaaagtcgccattaccgcgccgccggttgacggccaggccaacagccatctggtgaagtttctcggtaagcaattccgggttgccaaaagccaggtggtgattgaaaaaggcgaacttggccgccacaaacaaattaaaatcattaatccgcaacaaatcccgccagaaatcgcggcgttaattaattaggtatcctatgcaaaaagttgtcctcgcaaccggcaatgccggtaaagtgcgtgagctggcgtcgctgcttagcgacttcggtcttgatatcgtggcccaaacagacctcggcgtagattccgctgaagaaaccggcctgacctttatcgaaaacgcgattctgaaagcgcgccatgcggcaaaagtgaccggtttaccggcaattgccgacgactccggtctggcggtagatgcgctgggtggcgcgccgggtatttactccgcgcgttattccggtgaagacgcgaccgatcaaaagaatctgcaaaaactgctggaaacaatgaaagacgtaccggacgaccaacgtcaggcgcgtttccactgcgtgctggtatatctgcgtcacgcggaagatcccactccgctggtgtgccacggcagctggccgggcgtgattactcgtgaaccagcgggcactggtggctttggttatgatccaatcttcttcgtaccttccgaagggaaaactgctgccgaactgacccgcgaagaaaagagcgccatttcccaccgtggtcaggcgttgaaactgctgctggacgctttacgtaatggttaaattaccgccgctgagtctctacattcacatcccgtggtgcgtgcagaaatgcccgtactgcgatttcaactctcacgcgttgaaaggagaagtgccgcacgacgattatgttcagcatctgcttaacgatctgaacaacgatgtggcttacgctcagggccgtgaagtaaagacaatctttattggcggtggtacgccgagcctgctttccggcccggcgatgcaaacgctgctggacggcatacgtgcgcgtttgccgctggcagcggatgcagaaattacgatggaagcgaatcctggtacggttgaagccgatcgctttgttgattatcagcgtgctggtgtgaaccgcatctccattggcgtacagagttttagcgaagaaaagctgaaacgacttgggcgcattcatggcccgcaagaagcgaaacgagcggcaaatctggcgagcggtttagggttacgtagctttaacctcgatttgatgcatgggctaccggatcaatcactggaagaggcgcttggcgatctacgccaggctattgaactgaatccgccgcatctttcctggtatcaactgaccatcgaacccaatacgctgtttggctcgcgccctcctgtactgccggacgatgacgcgctgtgggacattttcgaacaggggcatcagttattaaccgcagcgggttatcagcaatatgaaacctccgcttacgccaaacccggttatcagtgccagcacaatctcaactactggcgctttggtgactacatcggtattggctgcggcgcgcatggcaaagtgaccttcctggatgggcgcattctgcgtaccaccaaaacgcgtcatccgcgtggttttatgcaggggcggtatctggaaagccagcgtgatgtcgaagccgcagataagccgtttgagttctttatgaatcgcttccgtttgctggaagccgcgccgcgcgtggagtttagccagtatactggcctttcagaagaggttattcgccctcagttagacgaggctattgctcagggttatctcacagaatgtgcggattactggcagataacggaacatgggaagttgtttttaaattcgctgctggagctttttctggctgagtaaatttgtattgccggatgcggcgtgcgtgtacgcagcatccggcaacaactcatgcgtcatcgcaaaaattacttaatcaccccattgcgccgcagttgttcggtatcttttttccagcgttcattagcctggttgatatcgtcaattttcatcaaaatcgcgacttttttactgtttatttctgaaactttcatcgttaacggatattgccctttttcgagcgttatccagtcatcctgcaatttacggctaagtttttgtgattgcagaaaagtctgtcgccgttgttcgttgatatcaaaatctcgtttctgctgaattggcacttcataacactcttcactctgtttatgacatgccgcaatcgccggttgataaacctctttgtcatatttaaccgcgaacgcctcactatcgttctgtttattaaaatcatcacgctgttggtgaatttttttaaaggcgtcttcgcgggtcatttgcttaccgtttgcatcttttccccaatatgcatccgctgctttctgcgccgccaccatttgcttatcaagcgcttttacatcctttttcagtgcaggaatcgagttattctggttattcaacgcagactcaagctgactaaagcgataattgaaatcttcgctattcacgatcagatatttattattcgttttgatatcgtcaaccacccgcccacgatcgctggctgccgcctgaaaagagtaaaagttcaccgaccagccagacgcgggcgttcctttactggttaacatcgccgagaatttcaccggtttatctttcgtccaggtctgttcgagcagctcgtaatctgccaactgaccgacccaggtatagagatcgtcactggaagagacatcgccttccgctgaccaggtggcctgattacccttagcatcaagattttttaaggtgatgacatcaagcttgagaatgccgtgatactgctttttgaattgatcttttaagatattttcagttggcggttcaccatctgcccagacattaccagtcatcaacataaacagcgccgtaccaacaatccattgctttttcacccgaaaaccctcgcgcggaataatttattccggtgattatcattagggtaataaaaattggcaatggacgtgagtctgaagtgaataagccccggcgcgataccggggcgaagtgattagtactgattgaagatctgctggatctgctgcggatctttagtttgcgtcagagccagttgcagcagaacgcgcgctttttgcgggttcaacatgccggaggcgacgaagccgtatttcgcatcatccacttcggcatcctgagtggtagcgcccgtcggtacgcgggaagaacgcactactgcagtgccgtttttcgcagcggttgcaagggtgtcaaatacggttttatacaggttgccgttacccacgccagcgctaacgatgccatcatagcccgcatctaccagtgctttagccggaagatcggatgcgttagcgtagttataaacaatgccgactttcggcagttcattcagcttagagacatcgaacggcgtgtcgctggtgtgcttacgtgccggggtacgttggtagtcaatcttaccgttgtgaatgtaacccagaggaccgtagttaacagacttgaaggtcgctacatcggtggtgttggttttggtgacatcacggccatcaagcacggtgtcgttcatcactaccagtacgccacgattagcggaggctttatcagctgcggtcactaccgcgttatacaggttgaatggaccgtctgcgctcatagacgtggacgggcgcattgcaccgaccatcaccaccggtttgtcgcatttcaccgtcaggtcgaggaagtaagcggtttcttccatcgtgtcggtaccgtgggtaatgacgaagccgtcagttttatcgcagtcggtgttaatttttttcgccagtgtcagccagacatcatcgttcatgtcctgggagccaatattcactacctgctcgcctttaacgttcgcaatgtccttcagttgcggcaccgcattaaccagattttctacgccaactttacccgctgtgtagttagatttggttgcggagtcaccaccaccggcaatggtcccgccggttgctaaaatggtgatattgggtaatgccaatgctgcaccactaaaacccataaccagtgcggcaagtgccgtctttttgaaaaactccatttcattcctccagttacgtgaacgctacgcattatcccttagctttgcatgggaaatttgacgttaaacaatttacaacgtgaatatattttggagatctacaaagttagaggcaggtaacaaaacgaagaattaaacggcataaaaaagtattatgccgtcttaaaatagaggattattttaaattcccgaccagggctttgcggctatcttccagagtcacaacgcggctacaaacatctttgccaaactgctggaaatctttttcctgctttttccactcggtttggattgaggattgcaggccgcccaggcttcccagcacgttctgtaatgggttaccgccgcttttcagcaccgctttcgcgcccatttcattaatgctgtcctgtaaaattccgcccattgcctgattcactaattgctggccttcggcacgaacctgatcaatggctttatagtgaaacgtcaggccatcgctgcgcgtttcgataatgcggttcatctgctctttcagctgcgcatcaagtttggtcagacggctgcgcattttgctgctttcgcccatctcctgaacgataattttatccagcgcaatacgagctttctcgacgcggcttttcgcgccttcatcaatccacggcagggtgctacgtagttcagcctgataatccttcgcctgctcgcgctgggcggcattcagggaatattgcttaccgttatacatcacgttgccgtctggcgtgatcaccagattgccgttttcgcccttcacctgcacggtttgcgggctgacaatcacatcgtcacgcggcgtgacgctgcactggtagtcggcgtgagcggtcattgccgtcactgaaagtgctgccgccagcagcattttgcgcatcatagtcttccctcaagaacaaatcaggccagcatttgctggccccagattgataacaaagtgcgcgttttccatgccggatgcggcgtaaacgccttatccggcctactcgatcgtgcatctttgtaggcctgataagcgtagcacatcaggcagttttgcatttgtcatcgcccgtatgctttcttagtcccaccaaacgtcgaaaagttcgctggtgcgtacctcttccagtttgcgttcttccagccacttacgcacaatcgcctgatgttcttcggtgcatttgccgatttcctgcatgcagatcagaccttcccaggccagataaccgctgccgtcaaaggccagtttgttcggttcgataacctcgttaataaagtcatcaacggttttatcaatctgttcttccgatgtaccttccgggaatcgccatgccaccgaaaatcctaattcctggaattcgtcgatgtgcatttttttacgcagacgacggctacggttctttgccattatttcaccctctcgaacattaagtcccatactccgtgaccaagacgatgaccacgttgttcaaatttcgtcaccggacgtgatgccggacgcggtacgtaatcattgctctctgacaggtttttataaccgtcaatagaagacatcacttcaagcatatgttccgcataaggttcccagtcggtcgccatatggaatatgccccccagctgcagtttgctttttaccagctcggcaaacggcacctgaacgatacggcgtttattatggcgcgctttgtgccacgggtcagggaaaaagagctgcaccatgcgcaatgaattgtcaggaatcattttatgcagcacttcaaccgcatcgtgacacatcacgcgcaggttgcttaagccctcttcatgcgcagaagacaggcacgcaccaacgcccggtgaatgcacttcaatgccgaggaagtcctgctcggggcgatctttagccattgccaccaacgacgcgcccatgccaaaaccaatctcaagcgtcaccggcgcttcacggccaaaaagcgcagggaaatccagcatatcttcgctgaactcaacgcccatcaccggccagtagttttccagcgcatgttcctggcctttggtcagtcgcccctggcggcgcacaaaactacggatacggcgcagcgggcggccgttttcatcaaattccggtgagatgacgtcgtttttcataaagatttagtcgcttgtgaaagtgttctgaaaacgggcattatccaaagttagttgccggatgcaagcatgataaggccgtggctgcggaaagttccggtttacaccctgccgtcgctgtgctgcaatcttgcccccaacaacagtgaattcggtgaccatgcaagcgtcgcaattttcagcccaggttctggactggtacgataaatacgggcggaaaacgctgccctggcaaattgacaagacgccctacaaagtatggctctcagaagtgatgttgcaacaaactcaggttgcgaccgttatcccctattttgaacgctttatggtgcgcttcccaacggtgaccgatctcgccaatgcgccgctcgacgaagttctccacttgtggaccgggcttggctattacgcccgagcgcgcaatctgcataaagcggcacaacaagtggcggccttacacggcggtaaattcccggaaacctttgaggaagttgcagcactgccgggcgtcgggcgttccaccgcaggcgcgattctctcgctttctctgggtaagcactttccgattctcgacggtaacgtcaaacgcgtgctggcgcgctgctatgctgtaagcggctggcccgggaaaaaagaggtcgagaataaactatggagtttgagcgagcaggtgacgcccgcggttggcgtggaacggtttaaccaggcgatgatggatttgggcgcgatgatttgtacgcgctctaagccgaaatgctcgctctgtccgctacaaaacggatgtattgccgccgccaacaatagctggtcgctttatccgggcaaaaaaccgaaacagacgctgccagagcgcaccggctactttttgctgttacagcacgaagatgaagtattgctggcgcagcgtccgccgagcggattgtggggcggtttatactgtttcccgcagtttgccgatgaagaaagtttgcggcagtggctggcgcaacgacagattgctgccgataacctgacgcagctgaccgcgtttcggcataccttcagccatttccacttagatattgtgcctatgtggcttcccgtgtcgtcattcaccggctgcatggatgaagacaatgcgctctggtataacttagcgcaaccgccgtcagttggcctggcggctcccgtggagcgtttgttacagcagttacgcactggcgcgccggtttagcgcgtgagtcgataaagaggatgatttatgagcagaacgattttttgtactttcctgcaacgtgaagcagaaggtcaggattttcagctgtaccccggcgaactgggaaaacgcatctataacgagatctccaaagaagcctgggcgcagtggcagcacaaacaaaccatgctgattaatgaaaagaaactcaacatgatgaatgccgagcaccgcaagctgctggagcaggagatggtcaacttcctgttcgagggtaaagaggtgcatatcgagggctttacgccggaagataaaaaataaaaacagtgccggagcacgcctccggcaacttgcataaaaacaaacacaacacgcacccggaatgatgaaaaaatatctcgcgctggctttgattgcgccgttgctcatctcctgttcgacgaccaaaaaaggcgatacctataacgaagcctgggtcaaagataccaacggttttgatattctgatggggcaatttgcccacaatattgagaacatctggggcttcaaagaggtggtgatcgccggtcctaaggactacgtgaaatacaccgatcaatatcagacccgcagccacatcaacttcgatgacggtacgattactatcgaaaccatcgccgggacagaacctgccgcgcatttgcgccgggcaataatcaaaacgttgctgatgggggacgatccgagttcggtcgatctctattccgacgttgatgatattacgatttcgaaagaacctttcctttacggtcaggtggtggacaacaccgggcagccgattcgctgggaaggtcgcgcgagcaacttcgcggattatctgctgaaaaaccgtctgaagagccgcagcaacgggctgcgtatcatctacagcgtcaccattaacatggtgccgaaccaccttgataaacgtgcgcacaaatatctcggcatggtccgccaggcatcacggaaatatggcgttgatgagtcgctgattctggcaattatgcagactgaatcttcctttaacccgtatgcggtcagccgttccgatgcgctgggattaatgcaggtggtacaacataccgccgggaaagatgtgttccgctcgcaggggaaatccggcacgccgagccgcagtttcttgtttgatcctgccagcaatattgataccggcaccgcgtatctggcgatgctgaacaacgtttatctcggcggaattgataacccaacatcgcggcgttatgccgtcatcaccgcctataacggcggcgcaggcagcgtgctacgagtcttttcgaatgataagattcaggctgccaatattattaacaccatgacgccgggcgatgtttatcagacgctgacgacccgccatccctctgcggaatctcgccgttatctttataaagtgaataccgcgcaaaaatcttaccgccgccgataattccactaaccgcccctgacgatgctcaggggtaaaaatgttatctacatcacaatttcgttttgcaaattgggaatgtttgcaattatttgccacaggtaacaaaaaaccagtccgcgaagttgatagaatcgcatcatctcgcacggtcaaatgtgctttttcaaacactcatccgcatcacgatgtgaggaaattaacatgaatcttaagctgcagctgaaaatcctctcttttctgcagttctgtctgtggggaagttggctgacgaccctcggctcctatatgtttgttaccctgaagtttgacggtgcttctatcggcgcagtttatagctcactgggtatcgccgcggtctttatgcctgcgctgctggggattgtggccgacaaatggttaagtgcgaaatgggtctatgccatttgccacaccattggcgctatcacgctgttcatggcggcagaggtcactacgccggaggcgatgttccttgtgatattgattaactcgtttgcttatatgccaacgcttgggttaatcaacaccatctcttactatcgcctgcaaaatgccgggatggatatcgttactgacttcccgccaatccgtatctggggcaccatcggctttatcatggcaatgtgggtggtgagcctgtccggcttcgaattaagccacatgcagctgtatattggcgcagcgctttccgccattctggttctgtttaccctgactctgccgcatattccggttgctaaacagcaagcgaatcagagctggacaaccctgctgggcctcgatgcattcgcgctgtttaaaaacaagcgtatggcaatcttcttcatcttctcaatgctgctgggcgcggaactgcagattaccaacatgttcggtaataccttcctgcacagctttgacaaagatccgatgtttgccagcagcttcatcgtgcagcatgcgtcaatcatcatgtcgatttcgcagatctctgaaaccctgttcattctgaccatcccgttcttcttaagccgctacggtattaagaacgtaatgatgatcagtattgtggcgtggatcctgcgttttgctctgtttgcttacggcgacccgactccgttcggtactgtactgctggtactgtcgatgatcgtttacggttgcgcattcgacttcttcaacatctctggttcggtgtttgtcgaaaaagaagttagcccggcaattcgcgccagcgcgcaggggatgttcctgatgatgaccaacggcttcggctgtatcctcggcggcatcgtgagcggtaaagtggttgagatgtacacccaaaacggcactaccgactggcagaccgtatggctgattttcgcaggttactccgtggtgctggccttcgcgttcatggcgatgttcaaatataaacacgttcgtgtcccgacaggtacacagacggttagccactaattacgcaaagaaaaacgggtcgccagaaggtgacccgtttttttattcttacttcaacacataaccgtacaaccgtttcatgccatccgcatcggtttcgctatagacaccttgcaactccggcgaaaatcccggcaacaaattcacgccttcttccagcgcaaggaaataacgttgaaccgccccaccccagacttccccgggtaccacgcaaagcacgccaggtggataaggcaacgccccttctgccgcaattcgcccttcggcatcacgaatccgcaccaactccacttcaccgcgaatataagcgctatgcgcatcctggggattcatcaccactgacgggaaactctgctggcggaacatcgctttttgtaggtctttgacgtcgaaactgacatacaaatcgtgcatctcctgacacaactggcgcagggtgtagtcgcgatagcgcaccggatatttgttataaacgctcggcaacacctcagccagcggcgaatcatcctcaatatgctgttcaaactgcgccagcatcgccaccagttgtgccagcttctcgtggctttccgccggagttaataagaacagaatggagttgagatcgcacttctccggcacaatgccgttctcacgcaggtagtgcgccagaatcgtcgccggaacgccaaagtcgctatattcgccggtttcggcatcgatacccggcgtggtgagtaacagcttgcacggatcaacaaaatactgatccgcggcatatccttcaaagccgtgccaattcgcccccggctcaaaactgaaaaaacggcggtcgctggctaacactgacgtcggataatcctgccacaatttgccatcaacaacgggcgggataaacgggcggaacagcttacagcgcgcaagaatagccttgcgcgactcaatacccaactcaacgcactcagcccacagccgacgcccactctccccttcatgaattttggcgttaacgtccagggcggcgaacagcggatagaacgggctggtagaagcatggagcataaaggcattattcaaccgcttatgcgggcaaaaacgcgcctgtccacggatatggttatcttttttatggatctgcgacgtctgtgagaatcccgcctgctgtttgtgcaccgactgagtcacaaagatccccggatcgttttcgttaagttctaacagcagcggcgagctatccgccatcatcgggataaactgttcgtaaccgacccacgcggaatcaaacagaatgtaatcacacagatgcccaacggtatcgatcacctgacgggcgttatagacagtgccgtcataggttcccagctgaataatcgccaggcgaaacgggcgcggcaggtcggctttttctggcgcaacgtcgcgaatttgctggcgcagatactcttcattaaaacagtgcgcatcaataccgccaatgaaaccaaacgggttacgtgaagcttccagatagaccggtgtcgcccccgcctgaatcaacgcgccatgatgattcgacttatggttgttacggtcgaagagcaccagatcgccacgcgttaacagcgcattcgtcaccactttattcgctgccgatgtgccgttcagcacaaaataggttttatcggcatgaaagactttggctgcaaatttctgcgcatctttcgccgatccttcatgaataagcagatcgcccaattttacgtcagcgttacacatatcggcgcgaaagatgttctcgccaaagaaatcgtaaaaatggcgtccggcaggatgctttttaaagaacgcaccatgttgatgtccagggcaagcaaaggtgctattacccatctcaacgtactgcgtcagcgtgtcataaaacggtggcagcaaattctcttcatactgacaggctgcggattccagctccagccactgctgctcgttgccgttgattaccgccgtaacgcccgcaggtaattcaacagcatgttcggaatacaaaaacaccggtagatgaaaaccggtgcgcttaagcaatgcaagaatgccactgcgactatccgcagcggtaatgacgactgccgcgacgtccgtaaaatcagtatctcccaacgccaccacgcggcgatgagtagaaagtcgggataccagttcactactggcggcaatattcattgatttcataagcgcaaaacccgtttaggggaagtaagaataccggacaaggaggaaaaccctgccccatgagatatgggtcaaactggtcaccagctccgaccgccagacatcagtaaaagcagaaacgctctgattttactgttgtcctgcagtgagcgtgcgttaacttcaccgcatgagcagtagcataaaaagagaagagtttcgcgcgaaacggcgataagcgagagaatgtaaggaggtggcgtgcatcgggcaaactccgtacagagaggagaaaattcgcgcaatcatggcacctttcgctaaagcgtgcaagccaggactttgcgaacaaacaagccatcgacggcgccaaaagttcataataagaaaatcaaacaatacagctaacaggaactcttgtggtcatcggcccttttatcaacgcaagtgcagtcttactgggtggcgttttcggcgcacttcttagccaacgcttaccggaacgtatccgcgtctccatgacatcaatttttggtctggcatcgctggggattggtattttactggtggtgaaatgcgccaaccttccggcgatggttttagcaaccttactcggagcattaatcggcgaaatttgtctgctggaaaaaggcgtcaatacagtggtcgccaaagcgcataatctgtttcaccactcgcgtaagaagccagcgcatgaatcttttattcagaattttgtcgcgattattgtcctgttttgcgccagcggcaccggaatcttcggggcgatgaacgaagggatgaccggcgatccgagtattttaatcgccaagtcatttcttgatttctttacggcgatgatcttcgcctgctcgctgggtattgcggtgtcggtgattagcattccattactgatcatccagttaacactggcgtgggctgccgcgctgatattaccgctgaccacaccgtcgatgatggcagacttcagcgccgtaggcggtttattgctgctggcaaccggattacgcatctgtggcattaaaatgttcccggtggtcaacatgcttccagcactccttctggcaatgccgctttccgccgcctggaccgcctggtttgcctgacaatgcgtgcaatagcggcaaagtgatgatagattgtgcagtctgcactaaattgaagaaatttgattgacgagacgaggcgaatcaggtttaatgcgccccgttgcccggatagctcagtcggtagagcaggggattgaaaatccccgtgtccttggttcgattccgagtccgggcaccaaattcatataaacggacctccacggaggtccgtttttcgtttcagaacgccacaatttaagcgttctgcctccaaatcaattctaccgaactcaaccagattccccccacatcaaccccattgtgtgggtataattgcgggtataccccagttcgacagaatttgtaccctctttaacgcattcagaaggctgaactatggcactgactgacgcaaaaatccgggctgcaaagcccactgacaaggcttataaactcactgacggggctggcatgttcctgctggtacatcctaatggttcccgttactggcgtctccgttatcgtattctgggtaaggagaaaaccctggcacttggtgtgtatccggaagtttctctctccgaagctcgtacaaaacgggatgaggcccgaaaactgatttcggagggggttgacccttgcgaacagaaaagagctaaaaaagtagtccctgatttacagctctcttttgaacatattgcacgacgctggcatgccagtaataaacaatgggcacaatcacacagcgataaagtactcaaaagcctcgagactcacgttttcccctttatcggcaaccgggatatcacaacactcagtaccccggatctgcttatccctgttcgtgctgcagaagttaaacaaatttatgaaatcgccagtcgtctgcagcaaagaatatctgctgtaatgcgttatgccgtacagtctggcatcatcagatataacccggctctggatatggctggtgcattgaccacggtaaaacgccagcatcgccctgctctggatctttcacgcctgcctgaacttctgtcgcgtattgacggttataaaggccagcctgtcacccgactggcagttatgctgaatttactggtttttattcgttccagtgaactcagatatgcccgctggtctgaaattgatattgacaatgccatgtggactattccagccgaacgcgaacctctgccaggcgtaaaattttcataccggggctccaagatgcgaacaccacatcttgtgccactcagccaacaggctgtagccatactggcagaacttcagacatgggcaggtgaaaatggtctgatctttacgggagcacacgacccacgtaaaccaatcagtgaaaataccgtaaataaggccctcagagtgatggggtatgacacaaccaaggaagtctgtggccatggattccgggcgatggcgtgcagtgcattgattgaatccggcttatggtcaagagatgcggttgaacgtcagatgagtcatcaggagcgcaacggagtacgtgccgcgtatattcataaagcagaacatctggaagaacgtcggcttatgctgcaatggtgggcagattttctggatgcaaacagggaggagtgtatcagtccgtttgaatatgcaaaagttaacaatccactgaaaaggtgactgaacgccatttacacacatgctcttcctcttaaggggaagagcacccgcctcaatcaatttcttttttatgccggcggaaccatcagccaggctgaggttctcattcaataactcaacgtcttaccacagaacagaattcactgtattatcatgggcaacgttaatcccggacaataaaaggacaccgatgccaggcatcacaatttttatagcctgcaggttatggtccatccttttttacaggttcagaatatgactggcaaattacgctttgaagtgaacgataaccagggctgtttcatatttccggaaacctggtttggctcgttgctggatgagtttgaagaactgattgatgcatacgatgcggatgaaatcagcgaaacaagttacatcaacaaactcaggcgccttgcccgacaggagaatgactttattgatgtacacgctcacttggcatacgtatttctggagcagaatgccccgcgtaaggcgctgaatgctgcccttaaagggctggcaattggcaatcgtcttatccctgaaggtttcagtggcagaatcatctggatacatcctgacaaccgaccttttcttcgtgccctctatgcggcaatcctggcaaatgcacatttacagcgtcatcaggatgccatcatgctcattgaaaaaatactggattacaatcccgaagataatcatggtgcacgctggctactgggaccggaactgttacgcactggcgctcatgaacaggcacgccatatactgcaggaacatgcagatgaattttcaccttactggtatgaactcggccttctgcattttcttaatggggaactggtaaaagctgcaactgcatttcgtcgcggctttgcggcaaatacttacatcgcagaaatactgtgcggaaatctgcatccatttccacttgctgtatggcataacttttcaggcggtccggatactgccgaagattattatgccacataccacccgttatgggggcaatatccggaagcattgctgtttgtaaactggctctataatcattcctctgtgctgcatgaacgggcagaaatcattaaatgcgccgaaatgctgatgcaggaagatgatttcgaaatatgcgaaagtattttaagacagcaggagaagttgcgtgaaagaattgatgagacgctttctgagaaaattgtacagaaatgcagaaatatgaatggtgaatatatctggccctggatattgccgttttcagcggcaggcatgaaacatactggcatacagtatcagtagatattgcattagtgtatcctgcacacaagtaataatttattcaccaataataacactgttaatgcccccttcccctggttgtcagccaggggttatcttctgaatatttcttttgaaaaggataacacagtaaattatttttatgaattatcccatggactcattaacaccctttcatgatgctttattgtcaaacacgttatggctgacatcaaaaaaaaccggatttcctctgccagcgggtaatcaccttcccggtgttttcggttggtctggttactcctgtctggttattagcaagataattgctataaacagtggaaaactcatcgtacataatctggtgatgaacattacgcttattttcccttgaccggaagaatcagaggctgtggtttcagactgtctgccagtacattcctctctccgttaaaaaccataacgggttcattatcttcgtctgtcagcagattgggtagaaatatacggccggcaaggtgtggagctgagccgttcactgctgtcgggctgggtggatgcatgctgccggcagctgtctccgctggaagaggcgcttcatgctgatgacacgcctgtcccggtgctgttgccaggcaataagaaaacgaagaccgggcggttatggacctacgttcgtgacgaccgtaacgccgggtcaacgctggcgccggcggtgtggttcgcttacagcccggacagaaaaggcatccatccgtaaaatccacgatgtgcacgttcgcaccccgtcagccctgacggaggaagcgctgaaacggatcggcgaactgtacgccatcgaggcagagataaggtataacgtttatcgacctcacacgaacaacgatggtttaccgccttgcttacatgaagaaaagtggaaacaggttattccggtgtcctgattttgtgaaccactacagtgaggtgtactggcaatagcggacacaaccatttgttctttttttaagcagccatctgatgatatttttccctgaaggctgccggggagatattccccagacgagagtgacgacgctgacgattgtagaaaatctcaatgtattcccgtattactgagatggcttcatcccggttattaaaacgatagtggctcaggctctcatttttcagcgttccccagaagctttccatcggagcgttgtcgtaacagttacctttacgcgacattgatgttttcagaccaaactgctcctgtatgacccggtaatcgtatgcgcagtactgtgaacctcgatcagagtggtggattagcccggcaggtgggcgctggctcctgagcgccataaacagggctttacctgtcagctcttttgtcatgcgctctcccatggcgtagccgacaatttcgcacgtataaacatctttgatgccagcgaggtacaaccatccctcctgtgtggcaacatacgtcaggtccgccacccagacctgatttggtgctgtaggagcgaacgtctggttcagcagatttggcgcaactggcagattgtggttcgagttcgtagtcgctctgaacttgcgtttctgcttacagcgtagccttagctccttacgaagacgtgccagtcggtcacgaccaacgatgatgccattctctgccagctccgtctggagccgccgggttccatatgtttcgcgagtgcggatatgtgccaccttaatctccagttttagccgctcatcactttgttttctgtctgagggttcatgctgtacccagttgtaataaccgctcctggatacaccaaatacctgacacatcgcttcaatgggaaattgttgtcgccattgttcgattaacgcgtatttttcagcgactcctgtgcaaaatacgcggttgctttttttaatatatctcgctcaaggcgagcttcatttaacgccttacgcagttgcagaatttcagattccagttcagccaccgtgcgggaaccaggagtaccgagcccttttctggcggcggtaacccattgtcctaaagtgccttcaggaagagataatcgggaagcgccttcactgatcgaaagttgattttcaagaaccgttctgacagcttcggctttgaactctttagagtaacgttgggtttttctgctcattattagctctgtaagcgtacagcctgaaccgtctggtcagaatctgacgaattagacaaagtggtgtccaccaaataagtagtgggaaccaaagtgtcagatatgcagaaaaatgtgactcccggcaggcgaaaaggctgccctaattatcctcccgaatttaaacagctgctcgttgctgcctcctgtgaacccgggatatccatctcaaaacttgctcttgaaaatggcattaacgccaatctgttgttcaaatggcgacaacaatggcgcgagggaaagctgctattaccttcttcagagagcccccagctacttcctgtgactctcgatgcagctgccgaacagccagaatcgctcgcagaggacccggaaaccctcagtatcagctgtgaggtaacgttccggcacgggacgctccgcttcaatggcaatgtcagcgaaaagctcctgactctgctgatacaggaactgaagcgatgatcccgttaccttccgggaccaaaatttggctggttgccggtatcaccgatatgagaaatggcttcaacggcctggctgcgaaagtacaaacggcgctgaaagacgatcccatgtccggccatgttttcattttccggggccgcagcggcagtcaggttaaactgctgtggtccaccggtgacggactgtgcctcctgaccaaacggctggagcgtgggcgcttcgcctggccgtcagcccgtgatggcaaagtgttccttacgcaggcgcagctggcgatgctgctggaaggtatcgactggcgacagcccaagcggctgctgacctccctgaccatgctgtaaatctctttatcctggttgtcacagaataagcccggtaaaatacgggcttatgaacgacatctcttctgacgacatcttcctgctaaaacagcgcctggccgaacaggaagcgctgatccacgccctgcaggaaaagctgagcaaccgggagcgcgaaatagaccatctgcaggcgcagctggataaactccgccggatgaacttcggcagtcgttccgaaaaagtctcccgccgtatcgcacaaatggaagccgatctgaaccggcttcagaaagagagcgatacgctgactggtagggtgtatgacccggcagtacagcgtccgttgcgtcagacccgcacccgtaagccgttccctgaatcactaccccgtgagctccttctgatgccattctatttcaggaaggagtgtccgttaaacacgaaaagcgactgttgcctgcggcgccgtgctgcccgaactgcggcggttcactgagctatctgggcgaggataccgccgaacagctggagttgatgcgtagcgccttccgggttatccggacggtacgggaaaaacatgcctgtactcagtgcgatgccatcgtgagctccttctgatgccattctatttcaggaaggagtgtccgttaaacacgaaaagcgactgttgcctgcggcgccgtgctgcccgaactgcggcggttcactgagctatctgggcgaggataccgccgaacagctggagttgatgcgtagcgccttccgggttatccggacggtacgggaaaaacatgcctgtactcagtgcgatgccatcgtgcaggcacctgcaccttcgcggcccatcgagcggggtatcgccggaccggggctgctggcccgcgtgctgacctcgaagtatgcagagcacaccccgctgtattgccagtcagaaatatacggccggcaaggtgtggagctgagccgttcactgctgtcgggctgggtggatgcatgctgccggctgctgtctccgctggaagaggcgcttcatggctatgtcatgactgacggcaaactccatgccgatgataccccggtccaggtactgctgccgggtaataagaagacgaagaccgggcggttgtgggcgtatgttcgtgatgaccgcaatgccgggtcagcgttggcacctgcagtgtggttcgcttacagcccggacagaaaaggcatccatccgcagactcatcttgcttgcttcagcggtgtgctgcaagcggatgcgtacgccgggttcaacgagctgtatcgcaatggtgggataacggaagctgcctgctgggctcatgcccgccgaaagatccacgatgtgcacgtccgcatcccgtcagcactgacggaagaagccctagagcagatcggtcagttgtacgccatagaggcggatataaggggaatgccggcagagcagcggcttgctgaacgtcagcgaaaaacgaaaccgctgttgaaatccctggaaagctggttgcgtgaaaagatgaagaccctgttcttcggctctggccatggtggtgagcggggagcgctactgtacagcctgatcgggacgtgcaaactgaatgacgtggatccagaaagctaccttcgccatgtgcctggcgtcatagcagactggccggtcaaccgggtcagcgaactgcttccgtggcgcatagcactgccagctgaataacacatccccgtcaatacggccctcgctgtacgcttacaacacatctgcaagaatcattattctcttgcctgaagctatccagcatcctcagatatttcgcgctttatgagctggcatcagcaaaatgtgccagtaactttttattaatgacttcaaacagttcctgttcatcatgggtcagataatcccagatttctttcagatacatgctttgtgcaagagtgagcctctgaataaaaaacataccttcagatgtcagactgatttttttagcacggcgatcctccctgctatccgtcctttttacatatccggctttttctaaaaaatctgtaatgcgggtaatattagttctggtaaactgaagtttctggcttatctctgaaggtgacagacaatggttctccgctgcgaataatgtggtgagaaccatatatgctgagtgatttattccatacacccccagaaattcagatatattatcctgcattcttttatttgtgcgaatacagagctgcatcaacaaatgttcccgaaagggatatgcggggtctttgtttttttggtgtctgattattttttctaatgtgtctgtgttattcatttcattattctccatattactgaaacacactgtctgtgtacaagcgcgcatcagtcatccggtaaacatcgactttccactacaatttattcctacctgatttctgtatgacagagacagcagacggataaattcccgcaggtaaaagaacataaatgctggctgctgacaagtctgtgaaaaaggattatcatcaacaacagttccgttaaaggttactctaccctgcccctgtggagtagttagagcagcatttacaccaaaagacaccactgccatagctaccgcaccggcaataaccgacttaatcataaataacaacctctttttcattactgaacacaccagagatatctggcaatttaaaatgacccgattacctttaataaccagatcaatacaaataatattctcgtattttcagggcaggttatttatcgacagaatactgatataacctgtctgctttctgacaagggcttctttttttatcttccagaaactccggaatgccataatttagtcaaatgccgatgactcatctgtataataaggtgcaagccttgctgcaagagcattcagccgtataagtctccccagtgttgtactgaaatacccattattcatctggtatttctcgcagacctccttacgggagtgcccacctaccagatagtccttcatagccagaatgaccctgtcactgtgaatagaagaaatacctatcagtaaaaaaaatgcatttcagacatagagccgagcaacagcacgctctcgcgtatattcagcaaaaacgcatttcctgaccgactgatgacttcatgatgcgccatgtttcccccttctgtcgggcccctggatatatgcttccggcccggaaatactcttcacgcaataagttaaatttagttttttatgttgtaaatattgatttaaacgatcttttaacccacaaaacaaaattaaaccagaataaaatactaacaacaagaatacactcagataaaaacatcatggtgaattgaatttacagcataaaagatcgtctaaatgcatttttacggactttcttttcacagaaaaataacacacaaaatgtgatacacatcaaataaagccaacaaaaagcaaattcactaaattgcacaaataaagcaaacacagagaataaaaatacctttccgttgataacagagagcatgatttttattattcgaagaaactttgttacagtgagatgagtgaatatatgaagaatgaaatactggaatttctgaacaggcataatggagggaaaaccgcagaaattgcggaggcgctggcggtaacggattatcaggcacgctattacctgttattactggaaaaagaaggtgtggttcagcgctctccattaaggcgaggcatggcaacatactggcttctgaaaggagagaagcaggcggggcagaactgttcttccacaacttaataactcaatctgtgggcatgcttcactgaaacagataaaagttacatcagagtgcagattcaattttgcagcattcatcacaaaatagaaatttagtattttatgtcagaatacttcacatgataataaaaacctgtctggatttactgcatggccagacattacaaaatacaaacgccataaacttcattcagccttcttgctgtccggtaacggaggctgctttttcgttacacctttccccggcagcatcagtagcagtaatttatagattctacgaactgagactgtctgtccggggagaacgtacacagcccgacacaatgtaccagtcaataatatccggtttctgattccctgcctgacagaccactctctggcaactttgtattcagttcatctactactggagacagatttataaaatccaactccacgatctttgaccgtccgcatcccctactctctgtgctgcggtcatcggttaattccagcgtccgtccgttacgatcagatattactgaacctccccgggtttcctggagagtgttttatctgtgaactcaggctgccagatcattgtttccgatggaagcataataagctttttctgcttctgccggaggagtatggcccagccttcccagcaatcatcgattgttataccagtccacccacgtgagtgtggccagttccacttctgcacggtttttccagctcttacggtgtattacctccgctttgtaaagaccattgatgctctccgccatcgcgttgtcatacgagtcgcctgtactccctgttgatgccagcagttttgcttcttttaatcgctccatataggccagtgacacatactgagagcctttatcgctgtgatggatggtgccggacggacggcgggcccacaacgcctgctccagcgcatccagcacgaatgtcgtttccatagacgatgagacccaccaccccacgatgtatccggcaaacacatcaatgatgaacgccacatagacgaagccctgccatgtgctgacgtaagtaaaatcagccacccacagctggtcaggacgttctgccacgaactgacggtttacgcggtcacctgcagcaacggttttccggctgacggtagtgcggacctttttaccccggagaacaccggcaagtcccataaccgccatgaggcgcgccactgtacatctggccaccctgattccttcccgtaacaactgacgccagactttacgcacaccgtacacctgatgattttcatcgtatacgcgctgtatctctctcttcagccagtcatcgcgctgagaacgggcactgcgtttatcaggatgatgccgctgctgctgacaatggtaatacgttgacggggcaatatgctgttcactgcataccggtccgaccccgtactgctcacgcagcttatccagcagtggcattattttttccagaggcggtcgaactccgccttcgcaaaataagcggaagcctggcgaaggatatcgttactgcggcgcagttcacgattttcacgttccagctctttcagacgctgacgttcagcggtggtgagcccaccatcaccgcccccggtatcccgctcatgctggcgaacccagacacgcagagtctctggcgtacagccaatctttggagctatggaacaaattgccgcccattgtgagtcatattcgtcctgactttccagaaccatacgaactgcccgttgacggacttcgggggaaaaacgtgtatttttagtcatcctgtttacctctttctcagggaatttagtctccaggattcccggggcggttcacagtaatcatgccgggtctggctggctaacaccccattataaggggtacgaataaagtaacggggcttcacgcagggatggacagattgctctgatatacagccgacgacgtcccgctgcaacatcatcacgcagatgcttcattttcagatttgggacctccttttgatttctcgtttaacttttgctgttaccagactttaatctattttaacaattcaagaattttttataaaatgctcaaagatgaaagcgttactgaaccaaccagcttggctgatgttttctatagataaaaagatcatcagcaaaaactgatagcctgaatcacctttactaccaatcatgtatgaagaaaacacgcacaaacaattgacaatgattatcatttgcattaaaaggattatgtagtatttttatttcatgaggaactatacccgccagcaatctgagtagcgaaagctgttcatccccaatatttttgctggcgggttcttttttctactgcccttctcctcagagggagcattccattctttttttcattaatggcgagggggcgggacaaaaagccggttctttatccctaaataacagcatgatttcagtccatgcaaaatctgatttaccagctcacataataacctgatgatacatgggttttccctgatcatggtgggaaggctcagaacgccatattcagtttcccgtagtggaacatcacgcccagcttaaagcgctcccgatttcggtatcccctggcttttatcctcagtagcctgatcttactgttaagcgcctccgcgtttccgtttgagacacggtgtcgcatggcattcaggatcccgtaaagcctttttcctatcgttttcgcggcgtttttcatcataggaacgtcactgttggccgccagagccagccatctctcccagtcattacgtctttcctcactccatggcctgttccagatatcctttgccagctctttcagcgcccagcactggcttgtcagcttcatctgtgcacgcagccatatcagcttttcctgcctggatttggtcatccatttatcgctgtactgccacaggaagcgggtcccctttgcctgacgccaactttcaacagggaggtgcggatgttcattctgacgggttttatcaaccacttcgccaagttgctttgctacatggaagcggtcgaaggcgattttctcaaccgcacagggtaagtggatacgcgctgctcttatatagcctgcattcatgtccattgagagcgttttgatagccagcaactgcccgtcagtaagcgtgcgaagatagccggcgaggctctctgtgccacgatcgtccgttaaggccagcgcacgaccatcgcgatcggagatcaccgttatataacgatgtccttttttaaaggcgacctcatccacattgtcagcaccagtgatataagacggatagcaaagcgcacgcgctgtttgtcaccgtgaaaaacgacggtgcgacggcaaaagccaataacaacgagagcgtcgtgcgcattcctctgcactgacagttgattcttagaacgtagaggcctggattgctgccaggcttttattgcactaccagctacggctaaaagataagcgtcccgggaagtacatagcgcttacaaaatatccgacatgaagcatactggaaacgaggcgtattgttattgttgttcatattggcttccgtggcggaaatatcagggggtagctacatatcccccatgcagccaaggcaacgatgttaactctcgtcacctgttcctttcgacagagccaacctcgcagagggccagatcttacaacttcacctcagtgatacaaaacacaaaaatacaaaacaatttgatacaaatcatccctcttattttaaataaatccatcttgcaagcctaccaatcagaaggtagcatgtgtagtatcgcaaacataaagagaaattgctcatgaattatgttatctgcactaccattgtcgcccttggtctcattctgacaggctacgcaactgctgcagatgaaattaatcgtcaggacgttgttggtttgatgccgtcagactatatttctgttggtaatctatatacaccagaagaggtggcaactgcgcttaaagacaaagcggagcaggcaggaggttctcatttccgaatcacttcattgggaggaaaaaataaacttgatggaactgccattatctatcgctaaaatatgtataatagtccctttaatacataacaggtaaagccgtgtctacttatgagaatatacttcgcataacggatactctgatccagcaacgcggatttttggggttcagttacgcagatctggaaaaagaaattggtatcagaaaagccagtattcatcaccatttcccgaggaaaactgatcttggtatagcctactgccaatacaaaacagaagtatttgatagacttaatataactctccataatgtttcttcaggtgtacaacgtctcaggacatatcttgatgcatttgctggttgtgctgaaagaggggaaatgtgcggtatttatgccatgctatccgacagccatcagttttctcctgaattacaggaggctgtaagtcaactggcacatcaggagatacagatgattaaagatattatcacctccgggcagaatagtggagagttcaaaacagttcttcttccggatgagctcgccgttatagtctgttctacactaaagggggcactgatgttaaatcgacttccaccacatgatatctattcaggaaccgttaacgctttaattaaaatgcttgatacccgtacttaatcctttttagtgcatataattttccacccggagaatgaaatgaaaaaatttattaatgtttacattaaatcagattatgacatagttattcttcgcctgtctgttattataatatttatgctcttcgggacctataaatggtttgattttgaagtgatggccctcaagcccctgatttctcccacgtggctgaatatcctgtacattatgtttggtgttcatggggggagctatttcctcggcatagtagaaactatcacttttctagcactgagtatcggcttcttcaggcctgctgctggcatactgggagatattatcgttattgttacaggtttagtcacactaagtctgttaccacaactgggaaaagttgacagttttgtcatcaaagatgtgctgctgttaggtgctggtagtgtcctgctgaaatatgatttgaaaaattatttaaatatcaaaaactgatttttcacttcggtgatgaacgtttgcgtattttcatggaaagagattacctaatccccctcgttctccttcatgttaatacgcaacgttatggaaaacaaaaataccctgagtaaaaaggtccgtaggcaggcgagtacttttattttccgctagttttactttcccatcgaaggccccatacatcactacgcccacgaaacaaccgacgaaataacgcaacttggctggatacaacgtattgccacagatatgcagcaactgcgtcagtccggaatgtcagtcatctccggggatgttggggtctcaggcacactgaccggccccccgtgttgtttccgggtactgtttttgatttatgcaacaaagtattgcagcgtcgaatatgagctatggccagatttttgttaatcgtggttgttgcaacatgtaaggcgaatgaccacactattctggcacgctcgtaatcacgctgaaattccgcttcctgtgctgccgtgaagagttccgaccaggacatacggcgaagtgtatgtctgtcagtaatatccgtcatgagctctcagcttcctccttcgtatttccgtcagaaacacaaacgccccgcagagaaaattcgccaacattctcctttttaatggcgtgcaatgcatcgcgacaggcccgttcggtatgaaatgcctggctgtgcaccgccagtgtgggctgccgggcatcaccggaagagacattaaagggagatgaaagccagaaaatcagtagccacatgcgtcacacctcgtcctttttatgcgggtatctggccagaatattgagcgcctgtaatggagcttcatgcatttcacggatacaacgggcatcggtgatgttttccctgtaatgcgtggtttccagcatcatatgatgcatatgcagcatccgggccagggctgcacggagttcttcaatatgttgttcatgggaatgctgacggggtggtatccggcagagagggataacctccacatcatccgggtgcgcgcgaagccacgcgtcagtgactgtaatgtcgtcagtgtaaaaccatgtgccggatgtcccgttggccagaaaacgcattttccaggcttctggggtggcggttgtgctgttatctttcatggtgccaccactcattcaacaggcttaatgctgtccaggcgcagtctgctcagactgtcgtggctgccacagcggcgtcctgtacttttgctgtagcactcctgccccctgatacaccatgccgttggcgtttcgtagaggctgacacgtcgggttttatctttactggctagaagcccggtgtgagtttttgtctttttcatcggtggggtacaaacgcagaaattttgttgtcatcagtttttgcctgcagaggcctgaaaagacagcgttttcagaccctgttcaggttagtgaatattcttacctggcctttcggcaatatcaatcccctgaagttgcatggatatcccatgcccattgagcatctggctgtccatggaatggataccgcatgtcaccatcaggttgtaacaaagcgtactcagcatggcgagcgcctcttctgaggatttacaatgtgtgttcataagggccagaaactgctcaacaacatccgggttgatgctggtactgtgtatttcatccttcattatgtgtccttgttttttattattttgcatttcagaaaataacacgatgcatgtaacccagaaaaccgatatgtgcacgcgtagtcactttctggcagattccggtctctgaaacaaaatacgaggtggcatgaagcggattgtggcggacagggaaagtgatttgattccggggaaggcgctgtgcagcagtcttatccggcagtttaaaggggtggacggagaccaatgaggcactggagcagattcagtgcagaggtgacctagacatgatttatcaaacttaattgtgacaaaatggcgattgagaaggtgcaattgacttatccggattcggtcgtggcgaggtggtgaccctgcattctgctaaccgggttatgagccaggagtcagcgatagacaaagggacttatctgaccgggcccccggaaaaatggcgggagagaatgataccttcctgctgacgagaccggactttgagatgacgagcgatagtgcggcagtgatgtacagcctgatcggtagctgcaaaacttaacggaatcgagccggaaacgtggctacgccacgtgatcagtgtaatcaacacctggcctgccaaccgcatgaaagagttgttgccctggaacgtcactctctctgtacactaatttttaccccacgtccttcacggtgcgcttacactctggacaagtatgtaaatgataagttaaaaataatccgtgcatttcctgtgacgatattagttgttggtaacgaaatctcattagcggatcggaaatgcacttaacctaatacgttgccactgttccgccaggagttacagtggcaacgtattctaccgtcagtgatagcgttttgttattatcagaactgatagttcagcgacatccagtaatttcgctcaggtatcacatatcctgttgttgatgatcccgtctggaagtaatcaccggcatacagcgtactcttaccggcactgtacaggctcacgtcactgtaatccttgttgagcaggttattcaccgcagcattcagcgtcagggcatccgtcatcttccacgacagacctgcattcaccaccgtccaggctttcaggtattctcctttctcatcatacactttcttctgtacagcgctcagtgacgaataattctgggtgaaacgtggtgttttcccgcgataacgggcacccagccatgatgccacctcttcggtgatctgccagttcagtttcgcattcaccatgtgttcaggggtataactcagcggcgcacctttgttatcaccatcacgttgttcacttcgggtccaggtgtaattcagtgacagcgtgacatcctctgaccacagcggcaatgtgccggcaaattccacaccatgcaaccgggcctttccgctgtttacatagctattggtgttatcatttacggaataagagacaatcttgttggagaagtcagtcataaaacctgtgacattggcattcagaccggcggggttatcgtaatacaccccagcctcataactgacgctctcttccggcttcaggtcggggttaccaagtagatttgtttttccctgcccggatacaccactaatccctttatgtagctgccccattctgggtgccttatatcccgtggtcacaccgcctttcagcgtccaggcatctgccacatcccagaccagatatgcacgcggactgaagtgtcccccgaattgctcatgatgttcatagcggctgcccacagtcagcgcaagtgcatccgtgagatgccactcatcctcagcaaataccgaccagcttttctgccggaaagtttcacctgtgctggcaaggacaactccgtctttcatggacgagctctgaaactcgccccccaccgtaaccagatgagattctcccagaggggtaagcagtaatgaattcaggataaggttcgattccttaagctcccgcggctgaccggcaagcccccatttgtcgcgcttcagtacactgcgtacgagctcacgacctttattttctgtctcgttccagttcagatacgatttccatgttccgaaggtgaaagtatgatcatagccagctgaaattttgtttcgctcatagcgcagggtccggtcatatccccccgtcagactccccagttgcccatcccggttatcataacgctgccgggtggtatccatatcaaaccagagcacatcctgcgccgacgccttccagtcaagacgtgcaccaagattataattctgtgactccgtgggataaggaatacgcgtggctgctgtatcgctcagtgatgtgaccgatgagccctgacgctgttgtgtgctaccgcgtacctgcaggctgacagaatcatccacaaggggaccactgctccagaaattaaactggctgctgttaccccatttgttgctttcctgcagattcagccctgcattgacggaagagagccatttgtctgcattctttctggtaatgatattcaccacaccgcccatcgcatcagagccatacagtgtggacatcggccccctgataacctcaatacgctcaatggcggccagagggggcatgaacccggtattcatggcagaaaaaccgttgggagtcacgtcactgcttccgccctgacgaacaccatcaatcagtatcagcgtgtaactggctggcattcctcggatgctgatttccagcccaccggttttacccgtaccactttcaacatccacaccctctactgatctcagagcctccgccagatcgtggtactggctggactgcaattcctcctggctaatcacagaaacactggcggctgcgttagtcagctttttctcatagccggatgcagagacaatcatcacatcctctgcagcagctatgctgctggctgaaaatccgagacagggaatgactacggaagccagagtggttattcgcatattactaatctccgatcatgttaaccggcaagacaatacataaatacaaacaataatgagaataatttatatttgccttttacaaaaaataaagattattgacaaaactaaatataaataacgactgcctcggcatgccagttaacagctatccgtatggcgtgttcggttttgcgaataaaaaatggttactgtagaagcggatttccaccacatgtcaaccatgaatggtcagtggtgcgagacgactgggatgatttggtcgatgacttcttccggcgaatactgatagaaacattgaaatattgtaagagaaagcgttcaaaattctgtggcacgtgaaaaattctacagcgtcatcaccttattcagtcgaccttcaaaataaacgtttaacagagacaatcaccatttggattgtccgctgaggaggcgaacgatttcctagacagctttatcatgtcagcccacattgttggcgctgacaatggatttgcccctatatttccagacacctgttatcacttaacccatcactggcccactgccgcagatattcccgtggcgagcgataacccagcgcactatgcggatgccattcgttataatgctcgaacgcctctgcaaggttctttgctgccgttaacccgtctggtttgggcatgatacttatgtagtcacgctttatcgttttcacgaagctctctgctattccgttactctccggactccgcactgccgtgttcttcggttcaagtcccaacatcctggcgaactgacgtgtttcattcgcccggtagcatgaaccattatccgtcagccactccactggagacgccggaagctcgctgccaaagcggcgttccactgctcccagcatgacgtcctgtactgtttcactgtcgaagccacccgttgtgaccgcccagtgcagtgcctcacggtcacagcagtccagcgcgaacgtgacccgcagtttttctccgttatcacagcggaactcaaacccgtcagagcaccatcgctgattactttctttcacagccactctgccggtatgtgcccgtttcgatggcggtacagcgggttttcgctcaagcaacagcgcattctggcgcatggtccggtaaacacgtttggcattgatcgcaggcataccatcaagttctgtttgtctgcgaagcagcgcccatacccgacgataaccatatgtgggtagctctccgataacatggtgtatacggcgaagcacatccgtatcatccgtgtgacggctgcggcggccgtccttccagtcatcggctcgtctgagaatgacgtgcaactgcgcacgcgacacccggagacaacggctgacgaagcttactccccatccccgggcaataagggcgcgtgcgctatccacttttttgctcgcccatattcaacggcttctttaaggagttcattttccatcgtttttttgccgagcagacgctggagttctttaatctgcttcatggcggcagcaagttcagaggcaggaacgacctgttctccggcagccacagcagtaagacttccctcctggtattgcttacgccagagaaataactggctggctgccacaccatgttgccgggcaacaagggagaccgtcatttccaggttcaaagctctgctgaacgatagcgatcttttcctgtgtagtacgccgtctgcgtttctccggccctaagacatcaatcatctgttctccaatgactagtctaaaaactagtattaagactatcacttatttaagtgatattggttgtctggagattcagggggccagtctagaagccagttccagacaatcctgataatacgcttatgaacattacaacacgctcatgcggaacctggatgggggaaggaacggtgaagctgttagcgaatgactggcgtttgtataaacgccggtcatgatgaatgatatttcagaatatacctcgggctaaaataccgggacagagatcaggcatgattaatctgcagcatttttaataacagaagtactgagcttactttacctttgatgatggaatagttatttccgtcggtactcatttttccctgaaataatgtcacggatgtttcttcctgctgatcctgcaggcgcagtcgtaaggtcatatttttaatgagctgagatccgggtggcaaggggtatttgctgtcagatactgggcgactgagtctgatgtggcgcgtatacagcccgttttcgtacagggtggcctctgttatggtgtcagtgaccagcatgtgggagacaatgctgtattcttttttaaagcacccaccagaaacggtgattgtaatgataatggtcttctcgatcgagatgtaaatacccgtttcgttatactgtccgtatcggaaccatgagaactcagttgcattccagccatgatccagaatatgtgcatttttttgcctgatagtttctttttttattcgctcatgtttaaggcataacaggcagataaataatgtcagaaaaagaaagctaataatgagagcaagagcgatatagtctgtcacagggtaatacatattctctccggtagaagaagggccgcaaacgcggcccgggctgttatcagaaagagtaacggaagttggcgttgatcgcgttatccacgttgtatttaccaaatgccgatttctcaaactcaagaccgaagcgaagattatcgcgaatttcagcgttgagaccaacattcatgagcatacgaccgtctttttcacctttgatacgtttctcaccggacgcatcacgcagtacggtttcaccgttggcaaacaggtcaaactggtagccaaggccggcgcgggctgtgactttccagtccttacccgagaaggatttacccacatcaacaccggtacgcccaatcagcggattaaagtccttatccttcatggtgaggttcattccctggtccttccaggagaactgtttcccggatacagcaccgtaaacaagttccgcctgcggctcaatccatgcagagtcagttacatggtaacggtaaccgacttccgcaccggcataccaggagtgggagctgtagtctctggtgccaaggccggcgaaagttgcggtatactcgttgtcatggtgaacgtacttaccgatgaggtcgatatatgctccggactcaaacatggcagaggcatagagaccggcacccacagacttcgtttcaccactgaaggcatcactgcctgcatggctgtcggtataggtcatggtcaccccggtgaagaggtcaaggccatcgagttcatgtttgttatccgcaccgacctgaacgtgggtgtagttgtcactgaatccaccgccggcagacccggttccgctcatgattcgggcccatgcaccggactcaccgttaatgtcacgcagatcacccatacgtttgttaaggttgttgacctcagcaaggaaggctttatagccgcctgacatcagtaatgttgcctttttagccgcatcggcgttggccacagatttatagccgatcagagtccatgttgctttgtctgtatcgttcttttgctcgataaccggtgttacatcactgaagccaatactccgagtcgtagctttaaagacatctactgcagttccttttggtgcgctgaccagatcgatattcagtccgttgctgtttccatttttctcaatgaagtcgactaacagaaggttgtttttaccagacaacgatttattgacaacaagctgatctgcttgggccagatttgcacgcagcacaaatgcactgtcatctatagtaaggttgtccactgtaagggttgtaaacttcccattatcaccagtaaaacgcaccatactgtcttttgtttctagacgattaattgatgactggctatttagatgccagatcgcattattcatgctaactgtagctttgggggctgttattgcgcctcgataggcggtatcaaagccatacaaaagagtctctgcccatgcctgataagcagacgatatagtcggtgtttcagtttcaggctgtcccagagtaatggttgctgcatcatcagcataaatatttccggtgacagatgccatatttctggcaatgaaatttgcatttccaccactcagcctgaatccatcagcagcgtagtggagacccggcgttacagttttactattctgttcagggattcccatcatagtcagctcaccggagatatcaataccttttgttgtgaacatggaattttgtgctataacttttgctcctttatctatacttataggagtattattcagaaaggttgcaccattaagtgtaactacagcttgatcacctatggctatttgactgttatgtgcagtgatgccacctgtaaatttagtttctcctatggatagattagtactgatagtttgtttgaagtcaaaaccattattagtaatatttttccctgcaagattatcaatgtaagcatttttatcgccgattgtgatagctgatttatttgctgatatatttccttcaacattggcattgcgtgatattgaaaagtcagcattgttcaggtgtaatgtatcaaatttaaacaccccggttttccagtctggctgatcaaatgaggtctgctgattattacttttgtgatcagaattgaactttttattatatgaactctctgtttctttcaaaacggtgacccagtccgttccacaaagaaataccagggagcaatgattcgctgtgcttctgaatattgcatgctctgttgcatggccttgcatggtaagactggcattactgacttcaacatcattttttgtgttgacactaccatccagaattaattttgcattagttttcttatcctgagaattaatattgtgcgttagttttatattgccatttatgttcccatgatatatgtaggagtcttcgttattgattgccagaacggcttctttcgttgtatctgagttagttattgttgttccatcgtcagtggcggcaattctagtaaaagtctgattgtgtccatttaaatctagcgtgccaccacgtttagtaaaaaatatccccgcatattgatcattgccaagggaattatctttatttagtattaccttaccatttccgcttgcaaggtatatattgttaaatgttccttcttcattaagaataacatttccttcacctatctttatatttgccccctgttttttttgaacattcagagtaccggggcctattttgtgtaaaacatcatcactggaatacaatgcattccagtttacaatgctttcttttccgatatcaattcctgctcctttaaatgtaaatccctgaccgtttatgttatattcatggccttcgtcaaagataataccaccgctaccaaaatccaaattatccttaaacaggacatttcccccatttgtgaacacaatatctttgtctttagttattttttcttgagtaccagtggtatctgcattgttttggtgtaatgttatatctgtgttttttatggttacattattgccattcagatttattttatgactataggtatcttttaactcactaaccagtttatcattgtattttgttatccatgtcagttggtcaccattaacgctggcaataccatgggttgttccgactaatacccatttttctagtttgttatcatataagtatgctccagagccgctgtctccgaatatttcaagattacgaaatgttttatcatttttataaatcatcatgccgtatgagtcccattgggtgacctcaaatagactagcacttaacagatcatggctatatgctgaatttgttgagattttggattcaccattaataaatgatgttcctccagagccagcacgaaaacctatgattttttttgaaccgtcagaagtgactataccgtagcgttctaatgcatcagaatatgttgtagggttggtctctgccggggtggcacctactgtttccacaacaaatttatttaacctctgaatctcaaaatcattggaatttcttctgtcaacaaccttgtaagaagactgagcgtaaacctgagtttctgcggcctgagggttctttttgttatgtgcaacagtaacactataagaacctcctattgcggtagctgcgccactcgctgctgcaccagaaaaatccggaattgagagattatggaaagagaatttatctccgttttttaaagtgattgttacgtctgttgctccgggctggaaaatacctttattttgtgcaagatcaagatagtctctcgcccatacatttgatatatcaatatttgctgcatttactgtaccggcaacagccagagacaacattgttgctacaagttttcggtttgttttaccagaaactcttttcgctaattcagaaacagcaatgagtccgccagtggcagcactatatttaagggagtatattttattcatatattctctcaactcatttattgaatgaacaaagtattaagaattaaaattattagtaacggttggttactaacagcttgctaaaagtaacagttctatattgtaaatatgtgacaatgttctcattaatgatgagagattatgtgaatcaatactaattgatcgttaattgatcgttttttgtttttttttgcccaatgtggggaggggtaatgtttaatatttcgatatgatcgaatatctgttcgcatggaacatcgttcagtgattcacgacgaattagcgatcgaccacgatgcgattttgcagtgtgccgaagaagttctccatcgctgcgttattcagaccgtttcctttgtgcggcatattttgtgctactccatggggctttaacttagcctatagcctgccattcgatattgccaaccctgatccgtatgtagctacggggcatcctccgggccgggcactgacaatgcatcgtgcaccatcgtattaacaatctccattaccggactttatgacaggcgcaggagaaaatctcccggttaaactgaacggagaaccagcgacaggtacctctttttaccctgtagcaagtactctataacatactcccccatttttcgttggccttcattgcagcaaagttccggctcaggatattgggcgcagatcatcctctcaggaatttcaggatctgccagacggtgctgagacgacgcttacttgtaaggttagttttcagacggacaatgaaatgaggatatgcgataaatttcagtcaaagatccataaaacagacataatgttattcagtggtgaacagtccattccggagacggaatatcttgttaaggctgtatattatactggctgtaaacaacatggccaccaaggaccatgttgtttacagcatacccttgttgcaaaagcatccccgtcagaacagcacagagtagttcagaccaaaggttcggcccctgcctttgtagtcgtacagtgacgctgggccgtaacccgggctgtagtacagtggtgcacgctgcccccagacagtggtgtagtcacggtcgaagaggttttcaatgctgaagctgagtgtacccaccggaagctgataactgccgagcagatccacggtggtatagccatcgaccttgtagccctgcgcgtcgctcacgtcaaaggaggtggtgctctgcacgcgcagactccacgggtccggtgcccagccaatgtaggctgtcgcttttgatgggcttgctgtcttcacatcgtatttctgccaggtaccgttcactttcgactcagttttcagcacgttgaagttcactccggtactccagtcagtatcaggaatcaggtagtccaccgcaccttccacgccgtaaatacggcgtttgtcgtccaccacgctgatggtcagatctttattcgccaccacgctcttatcagaaatcgaatagtaggccgcgatttgggtgcgcagattattgccagtaaagcgccagcccagctcataagaatcgactttcacgccttccagcttgctgtcgctgacgttcacactctttgttagaggaagatggccgttcactgcagcaccatagatgccgcgaccatagtatttacccgggtccggcagctccacgccctgggagaagttgagccatgcctgctggcgttcggtgatgtgcatcagcagaccggcgttgaacaggaagttgtcgtaatcgactgagccgccaggaatggcgtcggcggatgtagccttcccggcggcaatctgccgttgctgcgcgtagccgatgaaatcatcaatcttgttttcagtgtactgatagcgtacgccaccgttgagggtaaagagattattgatgtcatagctggattgcaggaaggccgccaggttggtgatgtcatacgacggatagcgcccggtggtgtaaatcttcttgttgttcagccctccggaagcgcttgcctgagccaggtcgaagaacatctggttggaggtaaagcgctcatgatcagcatccagcccccaggtgatttgccagccgtccatcggtttgctgttcagagtcagtttcatgccgtactggtcggtgtcctgctgtgacgaagagaaagccgtcacctgtttgttcgcatttaccgtcgggaacgggtagaatcgcaacgactcatcgcggtagtaaacctgaccgaccagctcctgtcccagaaaagcgctgtcagagtactgcaggctgatcaaatgccgctcagtgccgggaatacggtcggaattcagcccgttactgacgaatggcgtgctggtccctctgatggcagagaagcctttcccgagattaagcccgtaatcgtcgtcgccctggcttttatagtactgtgtgatcaactgaagctgccgggattcatcgatgttcagcgtaccagttcccatgatgtccagccgatcggagtactgcaggccggtctgggtgttatcaagcaaggtggcatcgccgttaccgtcaaaccagccgccaaatttctgatatgccacggaaagacgtccggagatatgctcatttccgccggagacagctccggcaatgcgttcatcgtgatctttactgctgctaaagccacttttggtgccagcctcaaactccatcatggtttccggctggccttttttggtcacgatgttgatcaggccaccggtactgccgccgccgtacagggacgtcgcaccggagatcacttcaatatggtcgatattaaaaggatctatagagtccagttgtcggctgtcggtacgtgaagagttgagacgcacgccgtcaaccagcacgaccagcgggcggccacgcacattcataccgtagttggtgcggctccggctgctgacgtcaaggccagggatcagctgagccagtgcgtctttaagctctttgccgccctgaatctgctgttccagttcggcgttttcgataacccaggtggtttgcgccatctccgctacggtgcgattgctgcggttggcagacaccacgaacgtttcatcatcggtttgttgagcgactgctggcgccatcatggtaagaagcagtgggttgagagcccaaagcgtatactttttgcttatcatcattattcctccatacgggcggaaaaaatcagcccaaagatgctgtgtagcgagttaaagaagcagcctccggctgcggttttttccggctgccgctgcgccactgaatcagggcgggcggcatactgagatcgaataaatcacgtcccattacgcgattaagaatacgtgcagatctccatgccatcaggctgagctggggttcggcgatgccatgggtttgcatactggcgttgaccacgaagatgttgttctctttcgggccactccattccagagtgaagtcatcacgcactttaaaggtgttcttatcgtgcatggtgatcaggggcatcagtgagggaagtatttgtggcaacgcagaacggtaacctgtggcgaaaatcaccacatcactttccaggctctccctgccctgatccagatgatgctccatcagcaacttccagccaggaccactactttccagagttgttaccgagcggctgggtagcagacggatatttcttggttttctcagaacttcaaaacggtggtacaactcacgataaatggtcagtaaagaatcggcagtgatgccatccgatgtcattttctgctcatccagtaactgatggcgaatatcttcctccagtccggagaagcctgaaatatattcaggtgtaaaatactcatcagcaaaagcagcctcatccagtgcgttaaaattattacgccgggagacccagtttatttccgccgcttctccccattccccgcgtaatgcattaaggaacaggtctgcaccactctgtcctccaccaaccacggttatccgttttccactaaggtccggccgacgaagattcatttcactggcatggaaacaggattgtgtcatatgcttcacacagggtggtaaataaggttgttttcctgtaccaaggcagatattgcgggcaaaatattctccctggctggtttgcaccagaaacaatcgacgttttttatcgaaatcaatgttttcaacggtatgactgaaatacaggttattcatatcttcagcagcccagcggaggtagtcagaaaactcttcacgggatactgtacgtagtctgcttgtaaggaagcgatagaactttttgtgcttcaccagatagttaacaaaactgtagggatttgtaggtgcaacagcactgaccagatctttcagaaagacggtctgcatatgacaatccggtaccagcatacccggatgccaggaaaaatgaggatgttcatcaaagaagagacagtccagttcttcgatctgatgtgacaacgcagcaatgctgagattaaatggccctgtccctacaccaataaaatcgacactttttttcatgattcatattcctgagttaccagccacagcggattttgcagatcctcaaggtaattcggcagcatgcggctgccgccatccagatcaggccaggtcagttttaccgggttcagcaccacgcgaatgatttgtggcctgaaaagtgagaaaagcgcaaaacgctctgacatttgtggatgttttttcatgtaatcactcaacactgctgccagcagttgataaaatcgcctttcaggtacgccaagacgaaccatcagtggcgaaataaaacgcagtactgtcacgaagtgacccgtctgcaaatcatggattaagtagtccgcactcaggcgggatgtaacatcacgaacctcctgaggcaaagagtccatttcggggaactcttctttcaccagtcgcatatcgccctggaagtctttcagcagaacacgctgtggaaccccctctttcatggcgagagttatattttgtccatgtgcaataagcgcgacaccgtagcggcaaagcaggtgatacagaggaaccacgaccacccggaacagttgcgtaagccaggtttcagcgtccagcccggagcggtctatatatgcgcctgccagcggctgattgttttcgtcgcactccatcagtgttgccatcagaaccggactttcatccggtttcagccagcggcacggattctcccgccagataacaccaagcatttcctggtagcgatagggagcccgggcaagcgcggcatagccttcatgggagacatagcctgcagccggttcaccaagtatcactgcgccgctttgcactagggtggcgtcggtcgcaaaaacctgttgtagccagcgtgaagccagtggtccggcagcgatgtatctgccagggatcccccggtagcatgaggtgttgtagatggtcagcggcagcttgatatccagcccgccccggcgactggcgttggtcagggtacgcagcgactgctgggcgagccactggtcgccaaactcgccgagagacaccatcctgccttcggcaaaatcagcgatgaagtcggtagcgattttttgctgccactgccacggatgtaccggcagcggcagccagttgtgatccagtccgttttcctgccagacctgactgaagcgtgtaaactcctgcggatccattgcggcagtcaacaactgctgaatatccagatcgttatcgcagcgccagatcatatgttcacgttttaccgccagccagtgcagtctgaaggtgttggtatactctggcgcatatcgttccagcgcctctttgccccagccacggcgacctttattaaaaacgaatttaggatgaccgctcagcaggcattgcagacgatcggcatcaagattaatcaggtcactggcactcagtccgcgacgggccttcagcagttgcaggtcgcccagtagcgtggcatacaaatcctgcatatgctctgcaacagtggcatcactcattgacagcaccggctttagctgcatcagcagcgtctgcgccagtactggttcgtccgtgcagcgcaacgtttgggcatcaatccacagccagccccagataccacgttcagcgatgaagcgccattgtgctcccggcaggttaatgcagtagtggtcatcgccctgagattccgcgtggaaaacctgctcatactccatctcagacaacatttttgccaccagccgacggttaacaaaatcccagtccttgtgattcattacagaccgacctccgtgaagaagtgatgacgatccgccatcaccatgcgcgagcgcttatgtgggaagtcgaactctttaattgtccggtatcccgcaggctcaagatggcggaacaggcgcaggttatcggtgcgtggctccagtactgtgcgctgcgtacggggctcatccagcagcaggtaatgtgtcagcccgcgcagccagctttgcacatagtgggccccgcgccattgctgttcaccaaccagcagatgcaggccacggtcaaagggctgccacgaatagtgacgaccaatgcggtcttccgccgcccagtagatttcgaaatagctgaatggccgatcgtcgaagcacccaatcagcgggaatgcatgtttaccggtgagctggcgctccagataggcggtctgtacctccagtgagccactttgctcccagaaatactcaacgcgcggatcattcatccagcgggtgaaacgttctgcatcagaaacgggatcggcaatgcggaaactcagcatcctgcgaatacgtggatcgtaacggcggtaaacctcaccctgtggacggggtgggcgctgcgggaaataaatctcacgctctgcatcaaaaaccatttcaccggaggcccggtttgccggtgaactcaaccataacggtaactgccagaaggcagtacgatggataatgtcgctttttacctgcccaaaaagcgtcagcgcctgtggctcctcacgccattcggcccaggggagagccactgctgacagttgtggagcggcgataaatatctgatccagcgcatcgcacagccaccctgtcggcagctccccgggacagtgcaacaccgcgctattgtccagtccccagccaagattcaggggcttgtcgagtttttcacagcgcagtccatatctgctgtgaataatgtttgcctcagacattcagacctcctgagcctgcagcgggttagcgaaatcgaaatagatcaccgaagggtcaacaatggtgttctcgttatgatcgttcagataacagaaaaagttaccttttacgttccagtacggactttccagcacgtagttgagacaggttttatgagtcacctgatcacgcacttcagccagcgatgctcgtacacgagccatcagattcgattcgctgtccagcccggcagcccccagcgcagcggtcacagcaaaagtggagttaaccagcaggtaataagggaaatagcgcagcaactgctcatgggtgaaaatattttccgcctgcgcctcgccaatagaatcgagccagtctgtcgcgtgaggcataaaagcgctgccctgacagtcacggtaaataaatccgaccggcagatccccaagcatctggacaagaatattttgctgatgcgccagcagcaccaggccgtaatccgcttcagccgtaaacagcggctttagcacttgctgacagtatgcatcgacccatgcatgggcggcctgttgcacagtgataccgaggcgatcgctcaggcgttttaccgccgaaaccagcagcgaatcaccgccatcaggtgcggcctgagtcagggagaccagtacgttagtctggcttttcggctgatccaccagcagattttcacgcagggcaaacagactttcctgcatgatgttgccgttaagatcgcgcagcccggcccagccatcctcctgcattacccggaaagtcgggaagcggacctgtagcatctgccagccgtcggtttgagccaggcgtgccaggcgcatcccacgcttcacttctttcacggacagagtacggatggagttggtcagccgtacgctcagggagaacttgatcatatcgcggctggtggcacagtagagggaacgggaagaggtggtcggcagccacgacgtgccggcctcacctaagtctttaatcagccctttagcaacaagtgcctggcaccacccctgctgcaaaagatattccccctgccacgggtgcaacgggaacagccattggttgtcacttaattcgttgagtaactgaggcgcattctctgcggcaaatcgcgtcagccgctgttgaaggttgagatgcaaactttcaccggcgatttgcgttttatccaccgaaaaccaccgcagtgggaagtggggtgccatatcaggcaggtagcgttcagcctcccgccggttaaacggttcatgagacttaggcgcagggtggaaagcgtgtcctgtcagcagcgcctgctcagcctcgccaaaattcaacgctttttcacgcagagcggcccagtcatgacgggcatcaattgcctgttgcgtatggacatggctttccagcacgcgctggtggaaagtttcgcagaggggaacgggcagaaacagttgatggcgtagcttatcaataataagccgggagagagtggtaaagtcgacaggataactgcctgatgccgtgaccagacgtgcaggaaatgcaaagcggtgatgctgggttggggagaaataagccactctgaaatggagcgatttctgctcatccagcgggatgagcaattcgtctggcgggtattctgtcagtttccagtctgtggtttcacgaatcagtgcattcaggaagcactgcgcagccacatctgtggctggtttttcagagggcagggtcatagtcaaacagctcccacacagcaaaataataacaattatgtcaataatgattctcattatcaataataaatgttattgtcagataaattaattttacaaataaacacaattaatacatggagttgaaacattataatgtcaccagggatcgaagatacgccccaaaaaccactgtcctgctggccacttgcgttcagtgccgggcttctcggtatcggacagaacggtctgctggttgtgctccctgttctggtcatacagacaaatctgagtctgtctgtatgggctgccctgctgatgcttggctcaatgctgtttctgccatcgtccccgtgctggggaaagcaaatttcccgtactggcagtaaacctgtggtgttgtgggctctgggaggatatggcataagctttaccctgctagggctgggaagcgtgctgatggctaccagcgccataacaacagcggtgggactgggaatattaatcatcgcccggatcgcctacgggctgaccgtgtcggcaatggtgccagcctgtcaggtctgggcattgcagagagctggagaagggaatcgcatggccgctctggcaaccatcagctccggcctgagttgcggcaggctattcgggccgctgtgcgcggcagcaatgctggccattcatcctctggcgccactggggctgctgatggcagccccagtgctggcgctgctgatgctgctgcggttgcccggcacaccaccacagcccacaccggagtgcaagagcgtcagtctgaagcgggattgtctgccttatctgctttgcgcaatattactggctgcggcggtgagcatgatgcagcttggactttcgcctgcccttactcgccagttcgccacggataccaccgccattagccaacaggtggcctggctgttgggtctgtccgcagtagctgcgcttatcgcgcagttcggggtactccgtccgcagcgcctgactccggtggccctgctcctgagtgccggagtgttgatgagtggtggtctggctatcatgctctccgaacagctatggttgttttacccgggctgtgcagtgctgtcatttggagcagctctggcaacacccgcttatcaacttctactgaatgataagctggctgatggcgcaggcgcgggctggctcgctaccagtcacacacttggctatggactgtgcgctttgctggtgccgctggtatcgaaaacaggtgtcgcaatcgcgctgattatggcagcattatttgcaactatattatttaccattgtgtctgtatttatctggcattaccgtactatcaaataaagatatgatcatcaccttactggagtaaatcagaggatatgagagaggacctgcgtctgatgaaaacatgtcaggcagtgttctggcttgctgcccccgccactccgtcatgtctctcagagaatcatgtcagagctgtagatatatcctgaacttgtctacaaataatttcttattttttgcgcataacattcagcaataactccccttctggccattgaattaaaatgtgtacttctctgtgacgttgtccagcttaattctgtcctccatgatgaccccagatacccgacagataaatcatcggcatcttcttctggctcattagttaattcatgtcggttactatcctgaaagctgagaaaatgtatttcatcatcagtccgttgtctgtaatgtccatatataaaatcatattctttttgataagattccttccagtaccaggttgtatcaccacacaaccatggaactctttctgacgaattaccaacacactgagatgagtattcagataactcagacctgaaagaagttaccatctgataaaacaagtcaggatgcttttcataatctggtgacataagatcaaactccccctgcatccagcagacagatagcagtttattctttctgttatattccagagctaccttaacccgggctactaagtcctcatagagtgctgttccggtgccccaccgcattgcatcagctgttgcccctgtatcaggtacatacataccttcagctccaacagtaaaggcggcacctcctctgcaacaaggaaccagtaatatccctgcttgctcaggtatgtatggcagtaactttttagctatatgcaatccctgtccgacacaaccatattcccctttatgcaaatcagcagccggatggtgatatccactcatatcctgaacatcatgcaggcagtgatctgccggaataatctcattgaatttacactcttttcctcctggtgtgattgtttttcgacgagccagttgttttacacgggactcgggtttgtcgagtgtatctggcaggggaataccttcaccgtaggccataccattagactgtcctgcgagggctatcacataccagaaacctattttttcattaaaatcatgatgatacatcattccccctttacataatagatttaattaaatattttcattattaaaagaaagtgttaaattaaaaactcatttgctctaatccatataaatcaatatatgtccgacaacaaaaaaaccgtgttacccgggctaacaacgaccagaaagcccattgttacaaaaaaactttcagaaatcgttgccgaagagcttgaaagaatgatccgccaggaggagataagggaaggtgaatacctgccttctgaacgtgaacttatggcattctttggcgttggaagaccatctgtcagagaggctttatcatctctcagacataaagggctaatccggtataacaagggagaaaaagccagtgtctgccgtccatcaccagaaaccatcattaatgggttatcaggcattgttaaagattttttatctacagctgatggcatcaaggattttgaaagactacgcatcttttttgaaaccaaccttgtaagatatgcagcaaaaaatgcaacgcctgaggatattcacaggcttgagaaggtgctcagtatccatcataactcactgagaacccccgaagtgtatgctcaatatgatattgaatttcatagtatacttgctgatatacctgacaataaagtattaaaaacaatacactcagcattttctgaatggctgataatggccaaacctctggaaaagaataaaatgacatatgaaaataacaaaaaaacccatcagcagcatattgaaatacttacggccataaaagagcatgattgtgataaagctgaacagctaatgtataatcacctttataaacgaattgaagcatcatagttactcgacgcttcaccaggtagtcaccataaatattatttaaatccatgagaatacatccagtccataaacagttttatccatcctccaacagaaagatctgtggcccactgaatactaaaaccatgccctcctttctcatagagatgcatttcagcagaaacgcctttctctattaggccacggtacatgagcagactgttttcaattgacacaagatcatcatcacaacaatggagtaaaaacacaggaggaaaacatgatgtgacattaagatccgcactatattgtattatattttctgaggtactattgtcccccagtaattgcttcctggagcctggatgtgtcacatcatctttcattgatattacaggataaattaacccgacaaaatcggggaatagcgaaaatctcttgttctttactgtcagaagaacgtttgaaatcacaaatctgattcaccaaacgttgaggcgatatgccccccagcagaaaatcctaatacaccaatacggatgacgctgtagatgccatttatcagcattcttacgaatataaagcattgcagatattgcatcaataaaagttttgtttatattttctccctcaactggcgatggtaatctgtaactaagaacaaataatgtatagccctgagataaaaactctggagcaagagctgtaccttccttatctaacataacagcctggtagccccccccgggaataatcaatattcctgttccatttggtttatctggtaaaaaaataattaactgaggagcataaatatctgtcaatacacgatcaagttcaaattccccgttatgttcaggatcctgataaatacggcctgaaagagatttactctcagatattgtctcacttgacaagtcaacaatagttgatttattaaacaagcttaacatcatttcatttaaagatctatctttattcattataaaccccattaaaataactcaggtgactgaacaactaatacagtcacctgcattacagttatttaacaatctttatttgtttgtcattttttttcagataaataacatctgaaacagctttaccatcttttttctccccccccagaatgagcatccccccctgccagggcaggcttacaccataagcaagtccttccggcaaagaaccaacttttttccagtcattttttattagctgatatatctcttttgaataggctttatccagtcctttatgagaccagtattcaccattgctatacttttctgccgcccccgggaaatatgcaccaccggccagaaagatatttccatcaataacagaggcatatgctcctgacaccccctcgggtgaagctactggtggaagttcagaccatttaattcgatcatgcgaaagctcccccgtccaggatctaacagaacgaagccccggttttctctcccctcccagtatataaatttgctgttctgcaaaaatcaccgatgaaccagcagttcccggaaatggagtcgttcccaggttcttccactggttttttgacgggtcataagaaattatatgattatttaaaaaataatcatcagcaggtttactaaaataatccctgttgactttctctgtcagcgcggaattcccttttgataactcgacatctgaaaagtatccattaaaaatattctcatttacaccaccagtagataccgcatgaccattatggataaaagaaacatgaccggcaagagatacagggggacgggtcatcaatttttcccatttatctttagcaatatcataggaatagacatctttttgtaaggttatgactccacttttatcttttccaattcctccaaatacatagatcttaccatcaataatagtagctgttgcctgctctctgggaactgtcggccattgcgctatcttagtccattttttttcactctggtttgtatctatcatataccagttatttcccagacttcctagtcctatatatattttaccattctcgatccctcctacaccatatttaaatggttcaggaatttccggtaaagctccggctaccgacgttccaataaacaagcagaagggaagatatataaagtttttcactttcattgtaatcaccttttaaaaattaatcagaacaccgacacggtaactattttcatgtttattatctttccccttatacaccccttgtttatccaagtaatcatattctatatatggggtgaacaccggtgacattttatattgcagaacaaatgcattttcagttgctgtttttttatgattcccatatttgaaattattaaccttcgtatataccgtggtctgccatgcaaacaaccatgaatcattaattttgtatgtcacataaccatcaaactgatgctgatcattacgcgccctgttgccatctaaatccgtctgtcggaaagctttccagtcatagcgatagcgtaaggccagattaagatctggcgttgcctgatacgaaattttcagataagggttatactgacttcctgctgacatccattgtgtctgaatccctgggattagagcccatttgtcatctattttatatgttttatttatatctattttattataattgagtgcaaacaattcattttcattgttgtgaattgtattccaggtgtttgactcaaaacttgcccaccaaccattattccacccctgactaacctgaatcaacgtttcataagcgtgactggcgcttctgtatcccccacgtagattaagagttaatgcctgagagcacaaaggtaaaccaagaagaattacagttaatagtggataatattttttcataaatgcctcatcattaaatatatttatcacttgtaatttgatttctcaatgaaacttatgttccgcaagccattccagaagcaggctttgccatttttctatcggatatccattttttccggatacaccaaatccatgacctcccttatcaaaaaaatgagcttctgcatgatgtcccttatcccgaatagagttaaaatatctcagagaatgaataactggaacatccttatcatctgttgcatgcacaataaagactggtggcatatactctgtaacactattttcaagactggctgaatattcactttcacctgcatccagaagacgtttccggcatccctgatgagcaatactcctgtcaagagatataactggatatatcagagccatccagtcaggacgcacagaagtctcttcctcataatggagatgagtaatatatccagcaagatgaccacctgccgaaaaccccatacatccaacactcttaaatgttctctccgacattccggcccagtaagaaataaagttcagggcattcttcgcatctgcaaaggaataataaccattaacggagggcattctgtaagaaagaataaatgccgtatatccctgacctgctatccatctgccaacatcaagtccctctctttcataaacaatcctcctgtatccacctccaggtataatcagcacactatgttgattagatacaacaggctcaacaactgtaataaggggcacaatacctgtatatattatgccatcgccagtattctcaaatagcgaactgtcagttatgtaacgctcataattatcaagagaatatatattctccctgtaatgaatcatttttttattccctgatagcatccgttattcttctgcaacattcttttttcttgctccataaaaaggttttccatcgacagtatcatattcaagcgcagcttctggatggatccatctctgtacacgtgatggcatatcaaaaccaataaggacaagaacaacaaatgttaagataaaagcaagagaacacattgctgtaccaagacttgtatgagacgcaacaactgcaccaagaataggcgcacatgctccaccaagtgaacctacattataaataaaccccagtcctgccgcacgctgctccacattaaaataaccactgattattttcggcaccagagcaccaatcccctgaccaaaaacctgctgagtaaagattagaaggccaagtaaccatacatagtcccggtccacaagaaaaacggggataataacaagctgaccgataagaagtgatataacatatgcttttcgggttccaagccagtcccccataaaaccacctatacaacttccagctgcagagccaaaacctgccagcataaatatgagagcaacagtttctggtgaatactgcatatcaaccttaagccatgtaggaagaaaagcctgcagtggccatccgtagaggaaacagaacataaccacaagcatcaacataatgcctgttggccatcttttccccataccctgatatataaaactgataaaaacagccgcacagcacaatgccataactgtgattaaagcagcgtttgcagtgacgcctgaaaaacaaacatatagacatgcaaatgcaatacaagacagaagaatatttatgtatttattcttttctctgtacagaatatccaccattgttctgacgggtttattctcttgttgccttttttgccagtcatcagactccggaagattcttgcgaagataaaaagcaaataatattggaagcatgccgacaaagaaaagagaacgccagccccatagtggtactacaatgctataaacctgtgcagctaaacctcccccaatagaaaatccagaaattaaaaaaccacttgccttgtttctgagatgaacaggccagctttcgataacatatgttacacttgagccatattcacctgccataccaagcccaataacaatgcgagcaataaacatcactgcatatccaggagccagaccacaggcaagggttccgagagagaatagcactatacttaaaaccattgccatcctgcgccccatcttgtccgataaagcgccaatagcaagccccccaaaccatcgagaaataaaagcagcggaaataaggcttgccgcttctattgtcgtcaagccgaattcatgctgaacctctgtaagaaccagagatatcagaacgaaatcaaaaccatcaagtaaataacctgtccatgccgcaccgaatatcttccactgtctgggtgaaagatgcttataccaaacctgctttttctgaatacaggagtccatattaaacctcacaataatagcggatttataatacactggagtattactttaagtaatacaatcccggtcccaaagagttgcaccaataagaccagagtcacttctgaaatatgccggaaacagcattacattacaaatttcagaatatatggaaagatgtttcgacactttctgaacatacccatcagcaagtccaacacttcctccgacaacaacaacctgacaatcaagcagtaattttaaacttactattaattcagcaatagtactggcagaacgctctgtcaaaaattctgcttccttatatccctgtctcgctaattcaaaaatatatttggtgctatatcctgcaagtttattttttgctgcccccatgatggcccgaccagatgaaaccgcttcaacgcatccccgacgaccacatccacattctgtatccgttactccggacaatatatgcccaacatgtccggctaatccagaaacacctgttaataattttctgttaactacaattccccctccaacccccgtagaaacggttataaaaaccatatcacaaatttctttcggcaaaactgtatattctgcccatgcggctgcctgggcatcatttatcacacttccatttaaaccagttatatcttccattatatttttcagaggatactctttcagccctccaagattgtctggattcagagctgtcaatactccattattaataatccctgttgatgctactgcaaatcgctccgctgttcccttcatttcagaaaccagtagacgtaaagcccctgtcatttcgtcaggacatctttcatgaggtgttgatatctgttttttcagcaaaaatgaaccgtcatcagatatcaacgccgctgaaattttcgttcctcctatatcaacagccagtgttatcattcattttcacctatataacaatcttgcaattattcagattattttcatttttttgtttctgtcatgttcttcgaacagtcgctctgcaagttttgataatacatccagattcttttcctttaccggagaaaaaggacttctgcatacaggagtatttataatccccatatagtaaagaagagtttttatacctgccaggacaccactctgaataagagtgtcaataacctggttacaggctacttgcatttccttcgccttaatcacatcattgtttttgactgcttcaaatatttcaagataacgccaccccattatattatatgtactaccgattcccccatctgcacctgcaattaaccctgatgcaaatatttcatcgtaaccattatataacacaagctctggatgattccttttgatttgttccatctggaataaatcaccggatgtctgttttaatgcacaaaccctgggtattgtgacaagctcatttatctgatctaaagaaaaacgcactccgctaagagccggtatattataaactaccatcggaagtccatctgcagaatcaataatcttcctgtaatggatacaatgctcttcaaatgaaaaaggataataaaatggagtaacagcagatatagcatgatatccgtatttttttgcagcttttgcaagtacctcgctttctgccgtactgattccgcccacatgcgctataagtgtcagtcttccatctgattcatcggctactgtttcaagaattttttctcgctctgcaacattctgaagaaatgcttctccagtagagcctccaacatacaatcccttaatattttgttcgatattaaaacggatcagttttcgaagactctccatatcgatttgctgggattggtcataaggagtgggtaatgctgatatgacccctttaaattcacattgcatttttaatcaccttcacttaactgcataatgggatacctagtacaccatcaagtacaaagattatccaacagaaaagaagcacaatgtgaagattatcaaaaaaaaaccatcagaaagctgtcatgccgctcagttaaggatcggttgatcgatccagtgtccagttactattctctgcgtaaccctctgcgactatcttgccccggaactgattacccacagccctgaagagtccgacactgtcacgctacgcaaacggcgtcttcctctggaaatgatggcctggtgaattatcagtatggcccatgagcgtaaggaaccttcaccagattgtgaaccggctggacacatgctgccaggtagtcgcccctttgtcgcgccgtgatccatgcccagcagcggccaggaagcggggccgtacgccacgtgttcacgtaaacagcgcaagcccttgacataacaccacgctgtatccgctctggtgcaatatgaacctgctgaccatcgaatggcgtgttctaactaacacaggacacgccagaacacgacataaagcttcactcgccagatacatggtaagcgtaaactgaccgccgtatgtagccattaagccagtattggtaacgtaggtgcccaccttttcatcaactagtggacacctgttatggaacagaaaatattatccgcagaaccccgcagaacattttcaaatgagtttaaacttcaaatggttaaactggcttcacaactaggagcctctgttgcccgtattgccagggaacacgatatcaatgataacctcctgttcaaatggctcaggctctggcagaacgaagggcgtatatcgcggcgtcttccggtaacaacctcttctgacgctggcgttgaattattacctgttgagataacgcctgatgagcagaaagagcctatggcggctcttactccgcttttatccactccttcacaaagcacagtcagtgccagttcctgtaaagttgagttccgccacggtaacatgacgctggaaaatccttcaccagagctgctcacggtgttgatccgtgaactgaccgggagggggcgatgatctcgctcccatcagacactcgaatctcgctggttgccggcgttactgatatgcgtaaatccttcaacggtctgggtgaacaggtacaacatgtgctggatgagaaccccttctccggtcacctgttcatcttccgtggccgacggagtgacatgattaaaatcctctgggctgatgctgatggtctgtgcctgttcaccaaacgcctggaggaaggcctgtttatctggcctgcggtgcgtgacggtaaggtatccattacccgctcgcagctggcaatgctcctcgataagctggactggcgtcagccaaaaacatcccgtcttaacgcactgacaatgttgtaaaaatgtcatggccggattataaaaacggtcatgagtcggaaatacctcattcgtatcactgagctggaaaggctgctctctgagcaggctgaagccctccgtcagagagatctgcaactgagtctggttgaagagacggaggccttcctgcgctctgcactggcacgtgccgaagaaaagatcgaagaggaggagcgggaaatagaatatctgagggcccagatagaaaaactgcgccggatgctgttcggtacccgttctgaaaaactgcagcgtgaggttgaacaggctgaggcccaactgaaacaacgcgaacaggaaagcgatcgttacagtgggcgtgaggatgacccgcaggttccccgccagttgcgacagtcacgtcatcgtcgtccgttaccagcacatcttccccgtgaaatacaccgcctggagcctgaagaaagttgttgcccggagtgtggcagtgagctggattatctgggtgaagtcagtgctgagcagctggaactggtgagtagcgccctgaaagtgatccgcactgttcgggtaaaaaaagcctgtacaaaatgtgactgtatagttgaagcgccagcgccgtcccgcccgatagcgcgcggcatcgcgggctccggattacttgcccgcgtgttaacgggaaaatactgcgaacacctgccactgtatcgtcagagtgaaatctttgcccgacagggtgccgaactgagccgtgcattaatctccaactgggttgacgcgtgctgccagttaatgactccgctaaatgatgccctgtaccgttacgtgatgaacacccgcaaggttcacactgacgacacaccggtaaaagtgctgacaccgggcagaaaaaaggcaaaaacaggacacatctggacgtatgtccgggatgaccggaatgcgggctcatcagagccaccggcggtctggttcgcctactcaccagacaggcagggaaaacatccggtacaacaccttcgtcccttccggggtatcctgcaggcggatgcattcagcggttacgatcggctgttcagtgccaaacgtgaaggtggtgcacagacagaagttgcgtgctgggtccatgcccggcgaaaaatacacgatgtatgaacgacatctcttctgacgacattttcctgctgaaacagcgcctggccgaacaggaagcgctgatccacgccctgcaggaaaagctgagcaaccgggagcgcgaaatagaccatctgcaggcgcagctggataaactccgccggatgaacttcggcagtcgttccgaaaaagtctcccgccgtatcgcacaaatggaagccgatctgaaccggcttcagaaagagagcgatacgctgactggtagggtgtatgacccggcagtacagcgtccgttgcgtcagacccgcacccgtaagccgttccctgaatcactaccccgtgacgaaaagcgactgttgcctgcggcgccgtgctgcccgaactgcggcggttcactgagctatctgggcgaggatatcgccgaacagctggagttgatgcgtagcgccttccgggttatccggacggtacgggaaaaacatgcctgtactcagtgcgatgccatcgtgcaggcacctgcaccttcgcggcccatcgagcggggtatcgccggaccggggctgctggcccgcgtgctgacctcgaagtatgcagagcacaccccgctgtatcgccagtcagaaatatacggccggcaaggtgtggagctgagccgttcactgctgtcgggctgggtggatgcatgctgccggcagctgtctccgctggaagaggcgcttcatggctatgtgctgactgacggtaagctccatgctgatgacacgcctgtcccggtgctgttgccaggcaataagaaaacgaagaccgggcggttatggacctgcgttcgtgacgaccgtaacgccgggtcaacgctggcgccggcggtgtggttcgcttacagcccggacagaaaaggcatccatccgcagacccatcttgcggggttcagtggtgtactgcaggcggatgcatacgccgggttcaacgagctgtaccgggatggccggataacggaagccgcctgttgggctcacgcccgccgtaaaatccacgatgtgcacgttcgcaccccgtcagccctgacggaggaagcgctgaaacggatcggcgaactgtacgccatcgaggcagagataaggggaatgacggcggagcagcgccttgccgaacgtcagttgaaaacgaaaccgctgctgaaatccctggaaagctggctgcgtgaaaagatgaaaaccctgtcgcgacactcagaactggcgaaagcgttcgcatacgccctgaaccagtggccggcgctgacgtactatgcagatgatggctgggctgaggcggacaataacatcgctgaaaatgcgttgcggatggtcagtctgggccgcaaaaactacctgttcttcggttcggatcatggaggagagcggggagcgctgctgtacagcctgatcgggacgtgcaaactgaacggagtggagccagaaagctacctccgctatgtccttgacgtcatagccgactggccgataaaccgggtcggcgaactgctcccctggcgcgtagcactgccgactgaataacacatccccgtcaatacggtttttgctgcacgcttacccttctgttgctcactcagggcatgtaaatcatgctcaaaccacgccccctgagcatctgtctgcagaatcaaccggccatgacaggaaaggcagaaacaatgccggatatttctgctgagcgcagagtcggcactgataatgtgctcacccggcgtgatccccagccccgtttttataccgttcattctgctaccccctcctcactgaaacgcccggtctggcagtgtgtgcagtactgctccccataataatcgtggtgacattgcctgcagtaccagctggctttacgtaccacgggtaaggcatccgggacgaattgctgcagacgtttaatcaaccgtatttctctgcgttccggcctgacataaggacattgctgcgcgtgctccgtcagcccgtcgtcagtgtgttcaaaccagggccgttcggtgtcgtattgcgggtggtatctgagtgcactgccgcaaaggtggcaggtgtagtgggcataaggagcagtttgtgcggtacgggcaccggtcagacgtccgttgccatcaagtgcgagaaaagattttgcgtacatagtatatgttcctctgcgccagacgacacacaggcaacagccgtcccggtacgggcagcgtggtcaggtgtgaatggcggttttcagttcagtctcagaagggaaaatcagtgtggtcgctgtgaacacgtcatcacactaaggtcagataagtcgtctgtcgggctcagccacgactgcagccaaagttgcgctcaccggtgccgtaagctttggtactctccttcgccagatagtcagcacgctccagcacctgctgaaagccggtgtcatcatcgcgttccagccacaccgccggcctgaccggaaaatgtgccagcgtgtcataacgtccggcatccactcccagggcactgcaccacgcctgtttaatcatcccggccagtgatcccggagcgcggtaatcgccggcacgacaccaggtatcccggttgaccagcagcatcaggtgatagtgttttttacctttgcactccccaaactcccgggcccagacgtaatgcagggttgtgggatgcacgcgtttaccttcccgatgcttacgtttctggtaagcgtcgattcgggctttcagggcattgatgaagcgggatatcacagctgcgtccgttgctgccggtacatccgggaaacgcaggtcaacccgcaatgccgtcaggcgggaatgaacattcagtgcgtgccgcaccgtctcacgaatacgttgctgccagaaggggttgtatttgtaggtcatggttaaatctccgtatggttcatacggaataaccacgtcgtaaaaaatgcgcagagcccctgaggtgacctccggcaggacactgtctcaggcactctgtgataacccgaacggtcatckccggactgacgattgaattcccggcgttgttttttttaatgtaaaaaacmggttacggataaggcgtggmgagggagckatcgtgataygcaaaaagaagtgcagggactgtggtaacgcaattactcataatacagtatgttgcccgtattgtggcgctgtcgaccccttcggttattaccggaagaccgatcgtctgctctgtttactgacgttactgctggtgctgattctggttaccgtttcaggcgtcagtgtatttgtactgttgcagtaggttacaggggagggattatcaggaatcggcggggcagagcgacccgctgcgtttgttgtgccagacagtaacgcaccggctccctgcaaaatggtacctgaatcaatcacagtcaggtattccgccaatccgtgatcgaatcgagcggaatactcagccccgacaaatacgagtccccttcagaagatacaggccggtaatgcctgaacgcctgcccctctgtacaccattcccttttgatttcgaattctttgttgccgttatactgcttaatgttcccgatcttccggtgcacagataacaccggagtcatcgtagcgcggattcaagattcaggtgacatatttccagacggaagccggcacgcgatcgtaaagtttgttcattgtcagttctgccagccggtgatcgaccgcagagttaaaggcttccagctccgcaggggtaagtttataacgtgtgtgggaaatcactttttccagcgtctcccgggatgaacaacgacggaactgctctggttttaacttccattcgtctctcgttactttatgctgtaatcaacgtgatactgccagcataccgcaccagactgacattctggtaccctccccaaactcattactcccgtgcaaccacttaaccggtctctcagcaatatcgccttaacgctacgtttagttatccgacaccggatgtccgatgccattgcgacaacctgaaggtaaccagccagttagctgagatgttaagctgctggctgcatacaccttgccaaatctaatcgctgttatcttaaccaatttccaggatacaagggggcgattactgagaatgctctcagactgtcactcaccagatcggatacgtttaccgctcaggcggatgcttaatgcactctgttcaggtgcattgcaggtacgttttatgtacgcaggttatacgccagttatcagggataaccctgtgagtacaacgcaatctgttgctactgggtagactggtctgctgatcacactcacagatttatttcacatatatgaactcatgtgtttgaactcatgtgtttgagctctcttatatatttataataccaatcagacagtcttatcccaccagtgatacctgtcgcctgcccacaggtcacaggtcacgggctgatgcaccacaaccgccttcaaaaacaactctgcaattatcagaacgccagttttccccttgtctcacgaaagtcctccctcctttatcacgtgcgcgtgcggaagcatcgtttcgcaacaatcacccgacataccggtacggctcagccaccgcaatccccccgtttatctcctgacggtcacattcccgattattttttacgtttytccccggttgttatgccggkgaaggtggtgcgttgttttcatcaccaacgccggttgagattaacaacatccggaggaacattttcatgaataccccagtttcactgatggatgaccagatggtcgacatgtcgtttatcactcagctgaccggcctgaccgataaatggttttacaagctcatcaaggatggtgcctttcctgcccccatcaaactgggccgtagctcccgatggctgaaaagtgaagtggaagcctggttgcaggcacgtattacacagtcccgtccgtaattcctgaccgttatccgttcaaccgcagcaaaggcatgatccggcccccggaggcattttgctgcgcgctaaaggagagaatattatgcaaaaacttgaaaaccggtgtgagctgctgctcatccagcatcagaaatggatgacaaacgtgacgaggcttatcgtcgctcatggaatgggggctccgcatcttcatggttatcaccgcctgaccctggcccacttttttctgccagaaaaaggcaccatcatctcagtggcaccacagggactctatcaggtcgtcaacccgggaacaccaccgttcattcctgccattcaggaagggttaatgaccagcattcagacccatgaaatcatgctgcttacacattttaatctgggcggcgttttactcagtgagctacatcgtctgggtgaaaaccggctggcaaacaggctgaacagcctgctccggcgtttcgacgatcgtgatctctaccacacgctgatatggctgtgctggtatgatctgatgtgtgcccactccatgcagccctggactgaagagttaaagcataaatcacatgcagagcttgaaaactgggctgtggcgcgcaaacgggaaaagcgcgagctggaactgatgattgacgagtacctgttatacgcctgttgattcataacgctcccgggcctccgcacacttacttttcctccgtcaccctcatgcagaagcgggggtgacgggcatactgcgataccaccactgaataatccgtctcagcaacagggaacattataagccaaaggattgctcatgccatcttatcagtttctggctgtagcacgcattcagttcaggcagcgtgatattgtttatttcggaaagcaggacataggtggtttttccttcctgcacgacagagagcctgagttgagatgcaagaatgttcagcaggacgttcagctttttcctgttccggaaccggcccgggccacactggagaatataatttttcctgacacggggcgggcattctccgcggcactcctcaatgagccagtcgagcagctcccgggcgtcctgcagctgcagttcagattcatcaggtaacgcaaataattttttatattcatctgtgtaccacgaacttattacgacagcagacgtcatgatatcggcagagattttcccttcaccctgactgaaatactgcaataacgcagcaattctcgcaatgttttctgttttttttgaaacatgtccccgaaactggcttaagggtccggaaggagacaaatcctgctccagaacattatagtgatcaataaatattttttgcgcttcaggagaaaaatgcagacaataacgttcatccttactggatttttcaatactgcctctggccagctccattaatcgttcatgaaatgccgttaatgatcctcccggggtcacagctccgttaataaagcgtttcccctgcgtggtggcaggtttactgattagacaacgggcaagaaaaccactgtccctggcaacagaaccttttcgctccatatatcggtcaaaaagaccgggttgtaccatgagggataatgtcattctggcattttcaatcatctgttcgggttcattctttctgtccaccgacaatacggagccatcccacattttgttaataaaaggcagctcagacagggtatacccatcaaatattataccggcttcatctgacataatacccactgaacgccatttaccacaaagctgattcttaattgccgcagtcgtggcatcattaaaaatgaatttatatcttacaggtttttcccctctgtttttctgaagcgcttccagttgtctgagcgtttctgactcatccgcgcctttgcggagttctttattcagttttgacaacaatgcttttttctgcgcctttaaaagctcttccttatttttccatgtcgtcagttcatttttgtgtctggaatataacagcatctcctgctggtacaggggctccattaataatttgtccactgcggtttttcgttctccggactcagcaagcgtcagtaagaaaagagaaaccggcccccgtagtgtattcagtctgcagacatcaatcagattctggcagacaagtgaaacagcgcccagggcagatgctgccacaagccccaggggagcctgcgtgatttgctgagcttcaataacggcatcacgaatgagtggaggcagcgagctcaggggaaactcatcaggatactgaaagtatggcataatgacctcacaacacacagaacataaagtaccgcaactattgctactaatagcaaaaatagcagcagaatcaatacaggataaaaatttctgtcgattttcagattaaataataaccattcggtattttgtcgctaaagaatgtcagaatgaatctgtgcgtctacgggcgctctccggaacacacacgttgattaaatttcacacaacaacgtaccagcaaaaagcatcatccagggtattgcaggtacgggtttcctgccgggaataaacataaacagtttccccggagtaacgctttcagaaaactgccctcctgaagaagaataaaataaagaaaatgacagttcctgcactgaatgctgagtacaatattctatggacaggatgacatttttataaataacaaaaaccatttaatactgatacatcaataaaatacttcctccctgctgacacagataaaatgcaacattttttcttcaaatacttctgtataatcgccagccaatgatgagaatggattaaaataacacttcttcgacaaacacaaaaaccagccttcattttcacatcatcatccagttttaattaaaccctgacgagcgacagtatttcagttcaggaattaaaagccagctattactcagtaaaaacaccaccaactaataatatctcagcagatatttcctgaccaggatgacacatttattaaagtttttttacaggacacttcacattactgaacgctattccgacagtatcactacacaaataaaaaagggaactggataaatattcatgccggaagaatggtgtaacaaaagcatttaatcattacgtgcgtattcctatctattcgatcacggtttggccaaaccgtgatcgattcagatgccattttgcaagtacgcatgacccggaagggaaacacttaacaacatggtatcaacagatatcattacgtgcgcactcttataaaaatacacagcagaagcaagataactctaaacgtaaatttaatatctcccactgactgccccgacaatatactgaaaaatactcacctcagtaaacataaacacacctgataatcaggctgcaagatgaatatttttctcctttacggagtaatcagcctgctgtttaacaataaccgcgtattttcatggaaggatatcacccaataacggataactcctgccctccttcatgttaatacgcaacatatccccatcgattccaaacaatttcagacagatattatctccgtggatcccccgccacctttccggtgtgcggggttttgtcttttttcaccgggaatacatgtatgaatccgtctgatgccattgaggcaattgaaaaaccgctctcctccctgccttactcgctttcccgtcacatcctggaacatctgcgcaaactcacccgtcacgagcccgtgattggcattatgggtaaaagcggggccggtaaatcttcactctgtaatgccctgtttcagggggaggtcacaccggtcagtgatgttcacgccggcacccgggaagtgcagcgcttccgtctgagtggtcacggttacagcatggttatcactgacctgcccggggtgggcgagagccgggacagggatgcagagtatgaagccctgtaccgtgacattctgcctgaactggacctggtgctgtggctgattaaagccgatgaccgggccctgtctgtggatgagtatttctggcgacacatcctgcagtgcggacatcagcaggtgctgtttgtggtgacacaggccgacaaaacggagccctgccatgaatgggatatggccggcattcagccctctcccgcacaggcacagaacattcgygaraaaacggaggcggtattccgkctgttccggccygtacatccggttgtggccgtatcggccygcaccggctgggaagtggatacgctggtcagtgcgctcatgacagcgcttcccgaccatgccgccagtcccctgatgacccgcctgcaggacgagctgcgcacggaatctgtccgcgctcaggcccgtgagcagtttaccggtgcggtggaccggatatttgacacagcggagagcgtctgtgttgcctctgttgcacgcacggttctgcgtgccgtccgtgacacagtggtctctgttgcccgcgcggtatggaactggatcttcttctgaacctgttgtggatgatgtcctccctgcctctaagtatgctcacaaaagcgctgttttcgttactgtctctcttgtccgtgcaatagcttgataaaagaataaaacgatcaatacccattttaccgatcgttaatatcgatcgttatgctaataataactcctgttagcaacgtgcgcagatacacacagacatgagattcagggaacaacagagccacacgtcagaaacttccgtcagccggacctccggcactgtaaccctttacctgccggtatccacatctgtggataccggcttttttattcaccctcactctgattaaggaaatgctgatgaaacgacatctgaatacctgctacaggctggtatggaatcacattacgggcgctttcgtggttgcctccgaactggcccgcgcacggggtaaacgtggcggtgtggcggtggcactgtctcttgccgcggtcacgtcactcccggtgctggctgctgacatcgttgtgcacccgtgtgaaacagtgaatggcggaacactggtaaaccatgacaaccagtttgtatccggaacagctgatggcgtgactgtcagtaccgggcttgagctggggccggacagtgacgaaaacaccggcgggcaatggataaaagcgggtggcacaggcagaaacaccactgtcaccgcaaatggtcgtcagattgtgcaggcaggaggaactgccagtgatacggttattcgtgatggcggagggcagagccttaacggactggcggtgaacaccacgctggataacagaggtgagcagtgggtacacgggggagggaaagctgccggtacaattattaaccaggatggttaccagaccataaaacatggcggactggcaaccggaaccatcgtcaacaccggtgcagaaggtggtccggagtctgaaaatgtgtccagcggtcagatggtcggagggacggctgaatccaccaccatcaataaaaatggccggcaggttatctggtcttcggggatggcacgggacaccctcatttacgccggtggtgaccagacggtacacggagaggcacataacacccgactggaggggggtaaccagtatgtacacaacggtggcacggcaacagagacgctgataaaccgtgatggctggcaggtgattaaggaaggaggaactgccgcgcataccaccatcaaccagaaaggaaagctgcaggtgaatgccggcggtaaagcgtctgatgtcacccagaacacgggcggtgcactggttaccagtacagctgcaaccgtcaccggcacaaaccgcctgggagcattctccgttgtggcgggtaaggctgataatgtcgtactggaaaatggcggacgtctggatgtgctgagcggacacacagccactaatacccgtgtggatgatggcggaacgctggatatccgcaacggtggtgccgccaccaccgtatccatggggaatggcggtgtactgctggccgattccggtgccgctgtcagtggtacccggagcgacggaaaggcattcagtatcggaggcggtcaggcggatgccctgatgctggaaaaaggcagttcattcacgctgaacgccggtgatacggccacggataccacggtaaatggcggactgttcaccgccaggggcggcacactggcgggcaccaccacgctgaataacggcgccacacttaccctttccgggaagacggtgaacaacgataccctgaccatccgtgaaggcgatgcactcctgcagggaggcgctcttaccggtaacggcagcgtggaaaaatcaggaagtggcacactcactgtcagcaacaccacactcacccagaaagccgtcaacctgaatgaaggcacgctgacgctgaacgacagtaccgtcaccacggatgtcattgctcagcgcggtacagccctgaagctgaccggcagcacagtgctgaacggtgccattgaccccacgaatgtcaccctgacatccggtgccacctggaatatccccgataacgccacggttcagtcggtggtggatgacctcagccatgccggacagattcatttcacctccgcccgcacagggaagttcgttccgacaactctgcaggtgaaaaacctgaacgggcagaatggcaccatcagcctgcgtgtacgcccggatatggcgcagaacaatgctgacagactggtcattgacggtggcagggcaaccggaaaaaccatcctgaatctggtgaacgccggcaacagtgcgtcggggctggcgaccagcggtaagggtattcaggtggttgaggccattaacggtgccaccacggaggaaggggcttttgtccaggggaatatgttgcaggccggggcctttaactacaccctcaaccgggacagtgatgagagctggtatctgcgcagtgaaaatgcttatcgtgctgaagtccccctgtatgcctccatgctgacacaggcaatggactatgaccggattctggcaggctcccgcagccatcagaccggtgtaaacggtgaaaataacagcgtccgtctcagcattcagggcggycatctcggtcacgataacaacggcggtattgtccgtggtgccacgccggaaagcagcggcagctatggcttcgtccgtctggagggtgacctgctcagaacagaggttgccggtatgtcactgacgacaggagtgtatggtgctgcaggccattcttccgttgatgttaaggatgatgacggctcccgtgccggcacggtccgggatgatgccggcagcctgggcggatacctgaatctggtacacacgtcctccggcctgtgggctgacattgtggcacagggaacccgccacagcatgaaagcgtcatcggacaataacgacttccgcgcccggggccggggctggcagggctcactggaaaccggtctgccattcagtatcactgacaacctgatgctggagccacaactgcagtatacctggcagggactttccctggatgacggccaggataacgccggttatgtgaagttcgggcatggcagtgcacaacatgtgcgtgccggtttccgtctgggcagccacaacgatatgacctttggtgaaggcacctcatcccgtgacaccctgcgcgacagtacaaaacacggtgtgagtgaactgcctgtgaactggtgggtacagccttctgttatccgcaccttcagctcccggggagacatgagcatgggtacagccgcagccggcagtaacatgacgttctcaccgtcccggaatggcacgtcactggacctgcaggccggactggaagcccgtgtccgggaaaatatcaccctgggcgttcaggccggttatgcccacagtgtcagcggcaacagcgctgaaggctataacggtcaggccacgctgaatgtgaccttctgacagaaccatcgcctctttgtggtcccgatcatcatgatcgggacccggaccggcgcaacggatattcaacgccacattcgctggcattaacagacatttatgaacgttctcacaccggttttatttccgatgcaacggcgaatggtctgattctcatgaaactgccggaaacctggagtacaaatgagaaaatgtttgcttccggagggcagggacatgggtttgccgctgaacggggaaaccatattgtcgacagagtccgtctgaaaaacgcacggatcctcggtgataataatgccagaaatggagcagacagactggtcagcggaacagaaatccagacgaaatattgttcaactgcagcggtgcggcattcgacggacagaacggacagtatcgttacatgggaaatcatggtcccatgcaactggaagtcccccgtgatcagtatgccggcgctgtggaaaccatgaagaataagatccgcgaaggtaaagtacccggtgtaaccgatcccgcagaagcgtcccggctgattcgtcggggacatctgacttatacccaggcccgtaatatcacccggttcgggaccatcgaatcggtcacttatgatattgccgaggggtcggttgtcagtctggcgaccggagggatcagttttgccctgacggcatcggtcttctggctcagcaccggcgatcgcgatgctgccctgcagacagctgctgtccaggcaggaaaaaccttcacccgcacactggctgtctacgtcacaacccagcaacttcaccggctcagtgttgttcagggtatgctgaagcatattgatttttcgacggccagcccgactgtccggcaggcgcttcagaaggggaccggtgcaggaaatatcagtgccctgaacaaagtgatgaagggttcgctggtgacatctctggcactggtagctgtcacaaccggccctgacatgatcaaaatgttgcggggacggatctccggtgcgcagttcatcaggaatcttgccgtggcatcttcctgtgtggcaggtggtgctgtcgggtcagtggcgggcgggatattgttcagtccactgggaccatttggtgcactgacagggcgtgtggttggcggtgttctggggggaatgattgcctccgctgtatcaggaaaaattgccggagcgctggttgaagaagatcgcgtcaaaattctggcaatgattcaggagcagatgacatggcttgccggcagtttcctgctgaccggacatgagattgaaaatctgaacgcgaatctggcccgtgttatcgatcagaatgctctggagatcattttcgccgccggtatacaacaacgggccgcgaccaacatgttaatcaaaccactggtggtcagtatcatcaggcaacgccccgtcatggaatatgatgcatcccatctcggcaatatggttaaccgactggaagaaacattacccccggagttaccggcataacggctattctgcgccttttacgttttatcacctgatttgtcagtgtcatcgtcatgactcagagaggtaaataccatgattcacctgttcaaaacctgcatgattaccgccttcattctggggttaacgtggtctgccccactccgggcacaggatcaacgttacatcagtatacgcaatacagatacgatatggctcccgggaaatatttgtgcttaccagttccggctggataatggcggaaacgatgaaggatttggccccctcaccatcactctgcaactcaaagacaaatatggtcagacgctggtgaccagaaaaatggaaacggaagcctttggtgacagtaatgccacgcgaaccacagacgcatttctggaaacggagtgcgtggaaaatgtcgccacaaccgaaatcattaaagcaactgaagaaagtaacggccatcgtgtcagtctgccgttatcggttttcgatccccaggactaccatccactgctgattaccgtttccggaaaaaacgttaactgatccctgaagtcagtttcatgcttcagcctctgtcacaacgcgtggcagaggctttttatttatcaggagaaaacagatatgctgggttacacacagagtatgtcctggctgaaggatctttctcatacgggcaggcggttgctgtcataaccgcttaccgcaatgtgtttatccaggatgacccgggaatgcatttccgtcgggttatccgcaacgcggaaggtcagcgacgctggcgctgccggaactctgaagctgatgccggaaaacagcttaatgcgtggctcgccagtggagggcttctcagacaataaacctcattgatttcatccatcaggccgcgtcttctccgggagacgcggcttttttcatttattacaccagtaaatcttaaccaccgataaggagcaaagtatgcgactagccagtcgttttggttatactgcaaaccagatacgccgtgaccgtccactgacacacgaagaactgatgcaccatgtgccggggattttcggggaagagaaacacacgtcccgaagccagaactatacgtacatccccaccatcaccgtactggaaagcctgcagcgggaaggctttcagccattcttcgcctgccagacccgtgtgcgcgacccgggccgccggggatacacaaaacacatgctgcgtctgcggcgggccggagagataaacggagaacatgtccctgaaattattctgctcaactctcatgacggtacctccagctaccagatgctgccgggttacttcaggttcgtctgccagaacggctgcgtctgtggtcagtctctgggggaagtgcgtgttccacaccggggaaacgtagtggacaaagtcattgaaggggcttacgaggtagtgggcgtgtttgaccggatagaggagaagcgtgatgccatgcagtcgctggtcctgccgccaccggcacgccaggcgctggcacaggcggcactgacttaccgttatggtgacgaacatcagcccgtcaccaccgccgacattctgacgccacgacgccgggaggattacggtaaggacctgtggagtgcttatcagaccatccaggagaatatgctgaaaggcgggatttccggtcgcagcgcaaaaggaaaacgtatccatacccgggccattcacagcattgataccgacattaagctcaaccgtgcattgtgggtgatggcagaaacgatgctggagagcctgcgctgatgcaatctgtccctgaaggcgtgattcaggcaccagaatcacccgacgccccggagagctcagtctgtgcagactgagtacaggcaatggcatctggccatccgtctgtgaccggaacggttacgcgtacggctgtccggaatttcagccgaatatcattcatccctgacattaccgggtctcacggtcagtgatgaacgtgatgttgtcagcccccggcctttactccctctcatttattcacattacaaggatttcatacatgaaaacattgtctcagaacaccacctcttcggcctgtgcaccggagactggcctgcaacaactggttgccaccatagtccctgatgaacagcgcatcagcttctggccgcagcattttggcctcattccacagtgggtgaccctggagccccgggtcttcggctggatggaccgtctgtatgaagactactgcggtggtatctggaatctgtacaccctgaacaacggtggcgcatttatggcacccgaaccggatgacgatgatgacgaaacatgggtactgttcaatgccatgaacggtaaccgcgctgaaatgagcccggaagccgccggcattgccgcctgtctgatgacgtacagtcatcacgcctgccgtacggagtgttatgccatgacggttcattattaccgtctgcgggattacgccctgcagcatccggaatgcagcgccattatgcgcattattgactgaaagggggcaggaacaatgcaacagatttcctttctgcccggagaaatgacgcccggcgagcgcagtctcattctgcgggccctgaaaaccctggaccgccatcttcatgaacccggcgtggccttcacctccacccgtgcggcacgggaatggctgattctgaacatggcgggactggagcgtgaagagttccgggtgctgtatctgaataaccagaatcagctgattgccggtgaaaccctcttcaccggcaccatcaaccgcacggaagtccatccccgggaagtgattaaacgcgccctgtatcacaatgccgcagccgtggtgctggcacacaatcacccgtccggtgaagtcacccccagtaaggcagaccgccttatcacggaacgtctggtacaggcactgggcctggtggatatccgggtgccggaccatctgatagtcggtggcagccaggttttctcctttgccgaacatggtctgctttaacccgtcacaaccacatcacacctgttttcacttttatcttctgtcttcagaggtatcccattatgaaaatcatcacccgtggtgaagccatgcgtattcaccaacagcatcctgcatcccgtctttttccgttctgtaccggcaaataccgctggcacggcagcactgaagcgtataccggtcgtgaagtgcaggatattcccggtgtgttggccgtgtttgctgaacgtcgtaaggacagttttggcccgtatgtccggctgatgagcgtcaccctgaactgaatcaggacgggcattcagatgagcagcattatcaccatcacagtgtatacgctggatgaactttcctgcccggcacggggaaaagcccgcgactggtaccgtcagcatcatgctgacagcaactggtatgaaaacgtgtatgaagacttcagggaggtctgtggcattttcgggattgacctccgccagcgcgttttccggctcagcaatggcaggtttatggaagagccgtgcatctggttcagcggattctgcagccagggggacggagcctgttttgaagggcgctggcactggcagccagcgacaccccggaaaatcagggaatatgcccctcaggaccgtgagcttcatcgtatcgcggataccctgcaggcggtgcagaaacgtaacttctggcagcttcaggctgaaatcagtcaccggggacgttactgccatccgtacagcatggatatcaccgtcacccggaacagtccgactggtcaggcaatgacaaccgatgcggaagccgctgtcagcgaagccctgcgcgacctggccttctggttgtaccgtcaactggaaaacgagtacgactggctgacctcagacgccgctgtggatgaggccctgctcatcaacgaatacaccttcaccgaagccggtctgtgcaccggctgacccgtcatcgttaaactatcattcaccgattttctgtgaggactttatcgtgtcagacacgctccatgaaacaaattatcccgacgacaacaacgaccgcccctggtgggggctaccctgcaccgtgacgccctgtttcggggcacgtctggtgcaggagggcaatcagttgcattaccttgccgaccgcgccggtatcagagggcagttcagcgacgcggatgcataccatctggaccaggcttttccactgctgatgaaacaactggaactcatgctcaccatcggtgaactgaatccccgccatcagcataccgtcacgctgtatgccagagggctgacctgcgaagccgacaccctcggcagctgtggttacgtttatatggctgtttatccgacactggcacccgcaaccacctcataaccccgaatatctcacctttagcactaccagttacagagaacttaagatgaaaacattacctgacacacacgtacgggaggcatcgcgctgcccgtctcccgtcaccatctggcagacactgctcacccgactgttggaccagcattacggcctcacactgaatgacacaccgttcgctgatgaacgtgtgattgagcagcatattgaggcagggatttcactgtgtgacgcggtgaactttctcgttgaaaaatacgcgctggtacgaactgaccagccgggattcagcgcaggagtcccgtcgcagttaatcaacagcatcgatattctccgggcccgccgggcaaccggcctgatgacccgcgacaattacagaacggtaaatgacattaccctgggcaggcatccggaggaggcgaaacaatgaacctttccctgacgccggaggccgacggcattaacgtacaggcgatgaacatggggcgcattgtcgttgacgtcgatggtgttaattttgctgaactgattaacgtggcctgcggcaatggctactcccttcgtgttgttgatgaatctgaccggaccgcaactgacagcatgccaccctccgctgccctgagcggtatacgctgcagcacctcacatatcacggaaacagacaacgcttggctgtactcgctgtcgcatcagacgaatgacaccggcgaatcagaatggattcattttacaggcagcggatatctgttacgtaccgatgcgtggtcatacccggttctgcggcttaaacgcctggggctgtcaaaaacgttccgccgtctggttgtcacacttacccgacgttatggcgtcagtctcattcatctggaatggaaacggaagcctttggtgacagtaatgccacgcgaaccacagacgcatttctggaaacggagtgcgtggaaaatgtcgccacaaccgaaatcattaaagcaactgaagaaagtaacggccatcgtgtcagtctgccgttatcggttttcgatccccaggactaccatccactgctgattaccgtttccggaaaaaacgttaactgatccctgaagtcagtttcatgcttcagcctctgtcacaacgcgtggcagaggctttttatttatcaggagaaaacagatatgctgggttacacagagtatgtcctggctgaaggatctttctcatacgggcaggcggttgctgtcataaccgcttaccacaatgtgtttatccaggatgacccgggaatgcatttccgtcgggttatccgcaacgcggaaggtcagcgacgctgacgcagccggaactctgaagctgatgccggaaaacagcttaatacgcggctcgccagtgaagggcctctcagacaataaacctcattgatttcatccatcaggccgcgtcttctccgggagacgcggcttttttcatttattacaccagtaaatcttaaccaccgataaggagcaaattatgcgactagccagtcgttttggttatgcgaaccagatacgccgtgaccgtccgctgacacacgaagaactgatgcactatgtgccggggattttcggggaagataaacacacgtcccgaagccagaactatacgtacatccccaccatcaccgtactggaaagcctgcagcgggaaggctttcagccattcttcgcctgccagacccgtgtgcgcgacccgggccgccggggatacacaaaacacatgctgcgtctgcggcgggccggagagataaacggagaacatgtccctgaaatyattctgctcaactcycatgacggtacctccagctaccagatgctgccgggttacttcaggttcgtctgccagaacgggtgcgtctgtggtcagtctctgggggaagtgcgtgttccgcaycggggaaatgtggtggacagagtcattgaaggggcttacgaggtrgtgggcgtgtttgaccggattgaggaaaagcgtgatgccatgcagtcgctgattctgccgccaccggcacgccaggcgctggcacaggcggcactgacttaccgttatggtgacgaacatcagcccgtcaccaccgccgacattctgacgccacgacgccgggaggattacggtaaggacctgtggagtgcttatcagaccattcaggagaatatgctgaaaggcggaatttcaggtcgcagcgctaaaggaaaacgtatccatacccgtgccattcacagcattgacactgacattaagctcaaccgcgcattgtgggtgatggcggaaaccctgctggagagcctgcgctgattcagccattaccctgaaaaccacgcatttatttgtcctttaaggagtcatttcatgaaaaccatttcacataattccaccacatcttctgtttccgtaaccgctgcatcagggaatgaccagcctcagttggttgccaccatagtccctgatgaacagcgcatcagcttctggccgcagcattttggcctcattccacagtgggtggccctggagccccgtgttttcggctggatggaccgtctgtgcgaagactactgcggtggtatctggaatctgtacaccctgaacaacggcggggcatttatggcccccgaaccggatgacgatgatgacgaaacatgggtactgttcaatgccatgaacggcaaccgcgctgaaatgagcccggaagccgctggcattgctgcctgtctgatgacgtacagtcatcaygcctgtcgtacggagtgttatgccatgacggtccattattaccggctgcgggattacgccctgcagcatccggaatgcagcgccattatgcgcatcatcgactgaatggaggcagggacaatgcagcagctttcctttctgcccggagaaatgacgcccggcgagcgcagtctcattctgcgggctctgaaaaccctggaccgccatcttcatgaacccggtgtggccttcacctccacccgtgcggcacgggaatggctgattctgaacatggcgggactggagcgtgaagagttccgggtgctgtatctgaataaccagaatcagctgattgccggtgaaaccctcttcaccggcaccatcaaccgcacggaagtccatccccgggaagtgattaaacgcgccctgtaccacaatgccgctgccgtggtactggcgcacaatcacccgtccggtgaagtcacacccagtaaggcagaccggcttatcaccgaacgtctggtacaggcactgggcctggtggatatccgggtgccggaccatctgatagtcggtggcaaccaggttttctcctttgccgaacatggtctgctttaacccgtcacaaccacatcacacctgttttcacttttatcttctgtcttcagaggtatcccattatgaaaattatcactcgtggtgaagccatgcgtattcaccaacaacatccgacatcccgtcttttcccgttctgtaccggcaaataccgctggcacggcagcactgaagcgtataccggtcgtgaagtgcaggatattcccggtgtgttggccgtgtttgctgaacgtcgtaaggacagttttggcccgtatgtccggctgatgagcgtcaccctgaactgagtcagtaaaggcattcagatgagcagcattatcaccatcacagtgtatacgctggatgaactttcctgcccggcacggggaaaagcccgcgactggtaccgtcagcatcatgctgacagcaactggtatgaaaacgtgtatgaagacttcagggaggtctgtggcattttcgggattgacctccgccagcgcgttttccggctcagcaatggcaggtttatggaagagccgtgcatctggttcagcggattctgcagccagggggacggagcctgttttgaagggcgctggcactggcagccagcgacaccccggaaaatcagggaatatgcccctcaggacaacgttaactgatccctgaagtcagtttcatgcttcagcctctgtcacaacgcgtggcagaggctttttatttatcaggagaaaacagatatgctgggttacacagagtatgtcctggctgaaggatctttctcatacgggcaggcggttgctgtcataaccgcttaccgcaatgtgtttatccaggatgacccgggaatgcatttccgtcgggttatccgcaacgcggaaggtcagcgacgctggcgctgccggaactctgaagctgatgccggaaaacagcttaatgcgtggctcgccagtggagggcttctcagacaataaacctcattgatttcatccatcaggccgcgtcttctccgggagacgcggcttttttcatttattacaccagtaaatcttaaccaccgataaggagcaaattatgcgactagccagtcgttttggttatgcgaaccagatacgccgtgaccgtccgctgacacacgaagaactgatgcactatgtgccggggattttcggggaagataaacacacgtcccgaagccagaactatacgtacatccccaccatcaccgtactggaaagcctgcagcgggaaggctttcagccattcttcgcctgccagacccgtgtgcgcgacccgggccgccggggatacacaaaacacatgctgcgtctgcggcgggccggagagataaacggagaacatgtccctgaaattattctgctcaactctcatgacggtacctccagctaccagatgctgccgggttacttcaggttcgtctgccagaacgggtgcgtctgtggtcagtctctgggggaagtgcgtgttccgcaccggggaaatgtggtggacagagtcattgaaggggcttacgaggtrgtgggcgtgtttgaccggattgaggaaaagcgtgatgccatgcagtcgctgattctgccgccaccggcacgccaggcgctggcacaggcggcactgacttaccgttatggtgacgaacatcagcccgtcaccaccgccgacattctgacgccacgacgccgggaggattacggtaaggacctgtggagtgcttatcagaccattcaggagaatatgctgaaaggcggaatttcaggtcgcagcgctaaaggaaaacgtatccatacccgtgccattcacagcattgacactgacattaagctcaaccgcgcattgtgggtgatggcggaaaccctgctggagagcctgcgctgattcagccattaccctgaaaaccacgcatttatttgtcctttaaggagtcatttcatgaaaaccatttcacataattccaccacatcttctgtttccgtaaccgctgcatcagggaatgaccagcctcagttggttgccaccatagtccctgatgaacagcgcatcagcttctggccgcagcattttggcctcattccacagtgggtggccctggagccccgtgttttcggctggatggaccgtctgtgcgaagactactgcggtggtatctggaatctgtacaccctgaacaacggcggggcatttatggcccccgaaccggatgacgatgatgacgaaacatgggtactgttcaatgccatgaacggcaaccgcgctgaaatgagcccggaagccgctggcattgctgcctgtctgatgacgtacagtcatcaygcctgtcgtacggagtgttatgccatgacggtccattattaccggctgcgggattacgccctgcagcatccggaatgcagcgccattatgcgcatcatcgactgaatggaggcagggacaatgcagcagctttcctttctgcccggagaaatgacgcccggcgagcgcagtctcattctgcgggctctgaaaaccctggaccgccatcttcatgaacccggtgtggccttcacctccacccgtgcggcacgggaatggctgattctgaacatggcgggactggagcgtgaagagttccgggtgctgtatctgaataaccagaatcagctgattgccggtgaaaccctcttcaccggcaccatcaaccgcacggaagtccatccccgggaagtgattaaacgcgccctgtaccacaatgccgctgccgtggtactggcgcacaatcacccgtccggtgaagtcacacccagtaaggcagaccggcttatcaccgaacgtctggtacaggcactgggcctggtggatatccgggtgccggaccatctgatagtcggtggcaaccaggttttctcctttgccgaacatggtctgctttaacccgtcacaaccacatcacacctgttttcacttttatcttctgtcttcagaggtatcccattatgaaaattatcactcgtggtgaagccatgcgtattcaccaacaacatccgacatcccgtcttttcccgttctgtaccggcaaataccgctggcacggcagcactgaagcgtataccggtcgtgaagtgcaggatattcccggtgtgttggccgtgtttgctgaacgtcgtaaggacagttttggcccgtatgtccggctgatgagcgtcaccctgaactgagtcagtaaaggcattcagatgagcagcattatcaccatcacagtgtatacgctggatgaactttcctgcccggcacggggaaaagcccgcgactggtaccgtcagcatcatgctgacagcaactggtatgaaaacgtgtatgaagacttcagggaggtctgtggcattttcgggattgacctccgccagcgcgttttccggctcagcaatggcaggtttatggaagagccgtgcatctggttcagcggattctgcagccagggggacggagcctgttttgaagggcgctggcactggcagcgtgagcttcatcgtatcgcggataccctgcaggcggtgcagaaacgtaacttctggcagcttcaggctgaaatcagtcaccggggacgttactgccatccgtacagcatggatatcaccgtcacccggaacagtccgactggtcaggcaatgacaaccgatgcggaagccgctgtcagcgaagccctgcgcgacctggccttctggctgtaccgccagctggaaaacaagtacgactggctgacctcagacaccgctgtggatgaggcccttctcatcaacgaatacaccttcaccgaagccggtctgcgcgccggctgacccgtcatcgttaaactatcattcaccgattttctgtgaggattttatcatgtcggacacactccccggaacaacgcttcccgacgacaacaaagacctcccctggtgggggctgccctgcaccgtgacgccctgtttcggcgcccgtctggtgcaggagggtaaccggttgcattaccttgccgaccgtgccggtatcagaggcctgttcagcgatgcagatgcgtaccctctggaccaggcytttccrctgctgatgaaacaactgraactcatgctcaccagtggtgaactgaatccccgccatcagcataccgtgacactgtatgcgaaggggctgacctgcgaagccgataccctgggctcctgtgattacgtttatctggctgtttatccgacgcccgaaatgaaaaattaactctccagaatagccttctgctacggcctggtgttttcaccacgccacttttccattttttatatctgcatatcaggaaaatcttcagtatgaaaacattacccgacacacacgtacgggcggcatcgcgctgcccgtctcccgtcaccatctggcagacactgctcacccgactgctggaccagcactatggcctcacgctgaatgacacaccgttcgctgatgaacgtgtgattgagcagcatattgaggcagggatttcactgtgtgacgcggtgaactttctcgttgaaaaatacgcgcaggtacgtaccgaccagccgggattcagcgcaggagccccgtcgcagttaatcaacagcattgatattctccgggctcgcagggcgaccggcctgatgacccggaacaattacagaatggtaaataacattacccagggcaagcatccggaggcaaaacgatgaaactggccctgacgctggaagctgacagcgttaacgtacaggcactgaacatggggcgaattgtcgttgacgtcgatggtgttgagcttgccgaactgattaacgtggtctgcgataatggctactcccttcgtgttgttgatgaatctgaccggacctcaacagacagcatacccccctctgctgccctgagcggtatacgctgtagtaccgcgcatatcacggaaacagacaacgcctggctgtactcgctgtcgcatcagacgaatgacaccggcgaatcagaatggattcattttacaggtagcggatatctgttacgtaccgatgcgtggtcatacccggttctgcggcttaaacgcctggggctgtcaaaaacgttccgccgtctggttgtcacacttacccgacgttatggcgtcagtctcattcatctggatgccagcactgaatgcctgccggatttacccactttcgactggtaacccggaaattcacaacatgaaatcattaaccacggaaacagcgctgtatattctgattgcgtggctgcaggacaatattgactgcgaatcagggattatcttcgacaacgatgaggataaaacggattcagcagcactgctgccctgcattaaacaggccagggaagatatccgtaccctgcgccaactgcagcttctgcaacagaaccggtgagtcttactcaccagacttcattccactgacgccagcctgaacagggctggcgttttcgtttatctgcgaaaaggaatatcgattatgtctgatatcacagtctcccgcccggaactggtcaacggacatacggacgttatctgctcaaccagtatccgccacattctggctgtacgaaagagtgcgctgctgcaaatcgacacacttatccggcaactggcagaaatctcagtactgacagaaagtattggaggtaaaaccgccctggactgggcgatgaaacaggattttcgctgcggctgctggctcatggagaaaccggaaaccgcaatgaaagccatcacccgcaatctcgatcgcgaaatctggcgtgacctgatgcaacattccgggatgctgtcattaatggatgcgcaggcccatgatacatggtaccgctcactggagtacgataactttccggaaatcagcgaggcgaatatcctgagtacgtttgaacaactgcaccagaataaggatgacgtgtttgagcgaggtgtgatcaacctcttcagagggctgagctggaattacaaaaccaattgcccctgtaaatttggcaataaaattatcgtcaacaatctggtgagatgggaccgatggggattgcatcttatcaccgggcaacaggcagatcgactcgctgacctggaaagaatgctgcatctgttcagcggcaaaccgatccccgacagccgggaaaatatcatcattcggctggatgatcacatccgctccgttcagggcaaagcgtgctatgaagatgagatgttcagcatcagatactttaagaagggctccgcacacatcacgttcaggaaaccagaactggttgacaggctaaatgacataattgccaggcactatccaaatgtattagcagacaggtaatgtggccttgccccgctattaaacatgtcatatttttgctatcattgtgaaaatttttcggaggaaacatgactacaaaagaccgtattcagtcccgactgaaccgttcaaaacgttatgtgttcacccgggatgatttcagggatatcgctggctatgatcaggttggcagagctcttcgtacactggtaaacgaaggtaagttgatgaaagtgggctatggtgtttacaccaaagcccgtcgtaacatcatcactgggaaaatcatgcccgcagcgcctgggggctctgctgcagtaattacagaggccctggagcgcctgaatatcagataccgtctggcaggagcaacggaatgctacaataaaggtcagtccacacaaattcctgtatctctggggataaaaacaccttctcgatttaaaagaatgttaatagtagggaaaagtaaaatcaatgcctgaattaacatcattatttcctgacgttgccgatgcactggatattgaatctgtcgctatcgtcgaaaaagattattttgtggttgatcttttaagattattaaaagaaataaaaccagaaacacatactctcgtgtttgcaggaggtaccgcattatcaaaagcaggtatctcgctaaacagaatgtcagaagatattgatataaagctcgtgccaacagagaactttatgcaaaatggcagagacaagagaagaaaaattcgcaaggaaatcgtgcaaataatcacggatgttattcataattctgacattttcagcttggataatgaaaacgcccgtataacacgtgatgagtatcgttataacgaaatctcggtacgttatccccagacatttgcacaagtcccctgtcttcgtccatttattaagctggagttgatggaaagcactctgctggaacatccggaaagcagagatatttattcccttgtcacggagttaacgggtaaaggtacacctgtaacagcattcccctgtgccaccattttatccactcaggctgaaaagctcatctccatgatgcgaagaacagcagcacatcttcgtaatcccgaacaacaggatgatgagtttctggtacgtcacatttacgacaactactgcattgtcagggaaaaaggtgtgaatgttcctgtattgaaaaattttgttcagatatgtattcacgctatggtaaccagtacccacaattttgtagctcaccagttgatgaacttaagaaagggctggatgcactccgggattatcctgtacacaaattgcgctttcaacgatttgttaaaccgatggtatttggtaatacacagattaactgggaagaagcctattccagtttcagacaaacagcgctaagtgttctgaccagctaacaaacgcgttaagtacgattccacaattcagcatatcgaaccagaccaaatgattacagcaaagcacaaaaaagagggattatagcgtcaaaagaattcgaattgcacatgggggcctcattggtggcctcaaaaacaacaaatacaaaataatctatataaaacaatttgttatacaatcagtttcattccgattccgggcaccactaattcttaagaacccgcccacaaggcgggtttttgcttttggatctttatataaaataaacttgggtgcataacgccatcaggtcttaaacactcccgaatcatcaataaacatcccccgctaacaaaacacagttcagttcacataacatccctgttatcccacacatatctgctggccgaacgacgccagtgcgcgtacggaggcaagagcagccctgcacatggcagcgcttgtggtaacctggtttaatccggtgaaagaggcgttttacatgcatctgccagcagccggaaaaaccaaaaaagtggcgctggttgactgtatgcgtaaattgctgaccatcctgaacgcaatgctcagaaagaacgaagagtgaaatgaatcgtagcatcatgttgctccataatttttacgttcaagacagttgattatcggcgcatatgactcaaaaagagcctgatgattgcctcttttccataggctctttctctgaagtgaaggaaggcccggaagaaagcactcgctggcatacgtgactccagctcaaccggagataatcaccattgttatttttctatttaataataatctcctgaaaaatagatatagcaaaaatacaatccggccagatttaattccgcattcattaccagaaataatcaacactacaactattatatcattcaatagtcaccgctaaaattttattattttcctcttctttacatagaaattatcaacctgtttattatgccgaatttaaataattaatcacaaaacaacatcaccattatttgcgtgttttatttattaataacatagtcatacgttctttttttacaaggaaataatcaattgataaattgtttttggtattaatagtcaagtaggaaacattttaacaaatgataaaaatcctaaattccttgttcataatgtaggagtgtgttaaataggtgggcaaaatttggttccctttctcgcctgtaatattgcagcgtcttcgcacctccatgagacattgcgacttaataagaaggtgataagtcctgcatataagcatggactgaccatggttttatattcattaaaaattttgttacaacccattgatttagcataaataaattatagtgggttcgggtttgttgtgactgtggcattatttccgtgcaaaggagctgatatgtctgaaagacatttacctgatgaccagagcagtactatcgatccatatctaattacctctgttcgccagactctggcagaacaaagcgcagcattacaaaacttgtctaaacaactggattccgggcagtaccagcgtgtccttaatttgataatgaactgtaaagggcacgttattctttcgggaatgggtaaatcagggcatgtcggtcgtaaaatgtcagcgacgctggcctctacgggtacgcctagtttctttattcatcctgcagaagctttccatggcgatctgggcatgattacgccttacgatcttctgatccttatttctgccagcggtgaaacggatgaaatcctcaagctagttccttcactgaaaaatttcggcaaccgaattatcgccattaccaataatggaaattccacgctggcgaaaaatgctgatgccgtgctggaactccacatggcgaatgaaacctgcccgaataatcttgcaccaacaacgtctaccacgctgacgatggcgatcggcgatgcgctggcgattgccatgatccaccaacgcaaatttatgccgaatgattttgcgcgctatcacccgggcggttcattaggtcgtcgcctgctgacccgcgttgctgatgtcatgcagcatgatgttcctgcggtacagctggatgcgtcatttaaaaccgtgattcaacgtatcaccagcggatgccagggaatggtgatggtagaagacgcagaaggtgggctagcgggcattatcaccgacggtgacctgcgtcgctttatggaaaaagaggattctctgacatccgccacggctgcgcagatgatgacacgtgaaccgctgacgctaccggaagacaccatgatcattgaagcggaagaaaaaatgcaaaagcaccgcgtctcaacgttattggtgaccaacaaggcaaataaagtcactggccttgtgcgcattttcgactaattaagcaacggggtgcgagaggttagtctctcattgagtttgcgccccactgaaactttgataatcgttacatgttgataaaagtgaagtctgccgtatcctggatgcgtgctcgtctgtctgccatctcactggcagatatccaaaaacacctggcgaaaatcatcattctggcaccgatggcggtgctgctgatctatctggctatcttcagccagcctcgctatatgagcgagtcgaaagtcgccattaaacgctcggatgatttaaacagcggcagcctgaattttggtctgcttctgggtgcctctaaccccagttccgcagaagatgcgttgtatctgaaagagtacatcaactcgccggatatgctggcggcgctggataagcaactaaattttcgtgaagcgtttagccacagcgggctcgattttcttaatcatcttagcaaggatgaaaccgcagaaggcttcctgaagtactacaaggaccgtatcaacgtctcgtatgacgataaaaccggattactgaatattcagacgcagggctttagcccggagtttgcgcttaagtttaaccaaaccgtgctgaaagagtcagagcgctttatcaatgagatgtcacatcgcatcgcgcgtgaccagcttgcctttgcagaaacggagatggaaaaggcacgccagcgtctggacgccagcaaagcggaattgctctcttatcaggacaacaacaacgttctggatccacaggcacaggcacaggcggcgagcacgttagtgaatacgctgatgggccagaagatccagatggaagcggacctgcggaacttgctgacgtatctgcgtgaggacgccccgcaagttgtgagtgcgcgtaatgcgattcagtcattgcaggcacaaattgacgaagaaaaaagcaaaatcactgcgccacagggtgacaagctaaaccgtatggcagtggattttgaagaaatcaaatcaaaagtagagttcaacaccgagctgtacaaactgaccctgacctccattgaaaagacccgtgtagaagcggctcgtaagctcaaggtgctgtcagtgatcagttcgccacagttgccgcaggaatcgtcttttccaaatatcccttatttgatcgcctgctggttactggtgtgctgcctgctgttcggcaccctgaaactgttgctggctgttattgaagatcaccgagactaacgctgtcgctgaatgagtttgtgatgaaattatttaaatcaattttactgattgccgcctgtcacgcggcgcaggccagcgcgaccattgatattaacgctgacccaaacctgacaggagccgcgccgcttaccggtattctgaacggacagaagtcggatacgcaaaacatgagcggcttcgacaataccccgccgcccgcaccgccggtggtaatgagccgtatgtttggtgctcaacttttcaacggcaccagcgcggatagcggtgcgacggtaggattcaaccctgactatattctgaatccgggtgatagcattcaggttcgcttgtggggtgcgttcacctttgatggtgcgttacaggttgatcccaaaggtaatattttcctgccgaacgttggtccggtgaaagttgctggcgtcagtaatagtcagctaaatgccttggtcacatccaaagtgaaggaagtataccagtccaacgtcaacgtctacgcctccttattacaggcgcagccagtaaaagtgtacgtgaccggatttgtgcgtaatcctggtctgtatggcggtgtgacgtctgattcgttactcaattatctgatcaaggctggcggcgttgatccagagcgcggaagttacgttgatattgtggtcaagcgcggtaaccgcgtgcgctccaacgtcaacctgtacgacttcctgctgaacggcaaactgggactttcgcagttcgccgatggtgacaccatcatcgtcgggccacgtcagcatactttcagcgttcagggcgatgtctttaacagctacgactttgagttccgcgaaagcagcattcccgtaacggaagcgttgagctgggcgcgccctaagcctggcgcgactcacattacgattatgcgtaaacaggggctgcaaaaacgcagcgaatactatccgatcagttctgcgccaggccgtatgttgcaaaatggcgataccttaatcgtgagcactgaccgctatgccggcaccattcaggtgcgggttgaaggcgcacactccggtgaacatgccatggtattgccttatggttccactatgcgtgcggttctggaaaaagtccgcccgaacagcatgtcgcagatgaacgcagttcagctttatcgcccatcagtggctcagcgtcagaaagagatgctgaatctctcgctgcaaaagctggaggaagcctcactttctgcccagtcatccaccaaagaagaagccagcctgcgaatgcaggaagcacaactgatcagccgctttgtggcgaaagcacgcaccgtggttccgaaaggtgaagtgatcctcaacgaatccaatattgattctgttctgcttgaagatggcgacgtcatcaatattccggagaaaacatcgctggttatggttcatggcgaggtgctgttcccgaacgcggtgagctggcagaaagggatgaccaccgaggattacatcgagaaatgcggtggcctgacgcaaaaatcgggtaacgccagaattatcgtcattcgtcagaacggtgcggcagtcaacgctgaagatgtagattcactcaagcctggcgatgagattatggttctgccgaaatatgaatcgaaaaacattgaagttacccgtggtatttccaccatcctctatcagctggcggtgggtgcaaaagtgattctgtctttgtaaggggttgaaatgagcaaagcagttattgtcattccggctcgctatggctcctcgcgcctgccgggtaagccactgctcgatattgttggtaaaccgatgatccagcatgtttacgagcgtgcgttacaggtggcgggcgttgcggaagtttgggtggcaacagacgatccgcgtgttgaacaggccgtacaggcgtttggcgggaaagccatcatgacgcgcaacgatcatgaatccggcaccgatcggctggtcgaggtgatgcataaagtcgaggcagatatctacattaacctgcagggcgacgaaccaatgattcgcccgcgggatgtagaaacgctgctacaaggaatgcgtgacgatcccgcgttgccggtggcaacgctatgccacgcgatttctgccgcagaagcggctgagccaagcacggtaaaagtggttgtgaatacccgccaggatgcgctttatttcagccgctcaccgattccgtatccgcgtaatgctgaaaaagcgcgctacctgaaacacgtcggtatttacgcttatcgtcgcgatgtgctgcaaaactacagccagttaccggagtccatgccggagcaggcggaatcactggagcagctaaggttgatgaacgcggggatcaacatccgcacatttgaggttgccgcaaccggtccgggcgtcgacaccccagcatgcctggaaaaagtgcgcgccctgatggcacaggaactggctgaaaacgcatgattggcatttactcgcctggcatctggcgtattccgcatctggagaaatttctggcgcaaccgtgccagaaactttctctgctgcgccctgttccacaagaagttgatgctatcgccgtgtggggacatcgtcccagcgcggcgaaaccagtcgccatcgccaaagcagcgggaaaacccgtcattcgtctggaagatggatttgtgcgttcgctggatcttggcgtcaatggcgagccgccgctttctctggtggtggatgattgttgcatttactacgatgccagcaagccttcagcactggagaaactggtacaagataaagccggaaatacagcattggctgatcaggccagagaagcgatgcacaccatcgtgaccggggatttgtcgaaatataacctggcacctgcgtttgtggctgatgagtcagaacgttcagacatcgttctggttgtcgatcagacatttaatgatatgtcagtgacgtatggcaatgctggcccgcatgagtttgctgccatgctggaagccgcgatggcggaaaatcctcaagccgaaatttgggtgaaggtgcatccggatgtcctggaaggaaagaaaacaggttatttcgccgctctgcgcgccacgcaacgagtacgtttaattgccgagaatgtcagcccgcagtcgctgttgcgacacgtttcccgggtttacgtcgtgacctcccagtacggctttgaagccttgctggcaggaaaaccggtgacatgcttcggccagccctggtatgcaggctggggcttaaccgacgatcgccatccgcagtccgctttgttatctgcccgacgcggttctgccacgctggaggaactttttgccgctgcatacctgcgttactgtcgctatatcgatccgcaaacgggagaagtaagcaatctatttaccgtgctgcaatggctgcaattacaacgtagccatctgcaacagcgtaatggttatttatgggcgccaggcttaacgctgtggaagtcagcgatcctgaaacctttcttgcaaacggcaacaaaccggctgagtttttcacgtcgctgtactgcggcgagcgcctgcgtggtatggggtgtaaagggagaacagcaatggcgagccgaagcgcagcgaaaatcactgccgttatggcgaatggaagatggttttctacgttcatccggacttggctctgaccttttgccgccgctatcgttggtcctggataaacgcgggatctactatgacgccacgcgccccagcgacctggaagtgctgcttaatcacagccagttaacactggcgcagcagatgcgagctgaaaaattacgccagcgactggttgaaagcaaactgagcaaatacaacctgggggccgatttctctctgcctgccgaggccaaagataaaaaaatcatcctggtgccgggtcaggtagaagacgatgcctcaattaaaacaggcactgtgtcgattaagagcaaccttgagttattacgcacagtacgcgagcgcactccgcacgcttacattatttataaaccgcacccggatgtactggtggggaatcgcaagggcaatattccgacagaactaattgctgaactcgctgattatcaggcactggacgcagatattattcaatgcattcagcgcgcagatgaagtgcacaccatgacatcattgtccgggtttgaagcgttattacatggcaagcaagttcattgttacggcctgcccttctatgccggttggggtttaaccgttgatgaacatcactgcccgcgtcgcgagcaaaaattaacgatagcagatttgatctatcaggcgttgattgtttatccaacctatatccacccaacactgctacaacctattacggttgaagaggcggcggaatatttgatccagacgccgcgcaagccgatgtttattacccgaaaaaaagcgggacgagtaatacgctattaccgcaaattaattatgttctgcaaggtcagatttggctaaacaatttcacagttgactattacacaaattatttatgcaaggtaatgcactaaccgttttattatccggtaaaaaatatctgctattgcaggggccaatgggaccctttttcagtgatgttgccgagtggctagagtcattaggtcgtaacgctgtgaatgttgtattcaacggtggggatcgtttttactgccgccatcgacaatacctagcttactaccagacaccgaaagagtttcccggatggttacgggatctccaccggcaatatgactttgacacaatcctctgctttggcgactgccgcccattgcataaagaagcaaaacgctgggcaaagtcgaaagggatccgcttcctggcatttgaagaaggatatttacgcccgcaatttattaccgttgaagaaggcggagtgaacgcatattcatcgctaccgcgcgatccggatttttatcgtaagttaccagatatgcctacgccgcacgttgagaacttaaaaccttcaacgatgaaacgtataggccatgctatgtggtattacctgatgggctggcattaccgtcatgagtttcctcgctaccgccaccacaaatcattttccccctggtatgaagcacgttgctgggttcgtgcatactggcgcaagcaactttacaaggtaacacagcgtaaggtattaccgaggttaatgaacgaactggaccagcgttattatcttgctgttttgcaggtgtataacgatagccagattcgtaaccacagcagttataacgatgtgcgtgactatattaatgaagtcatgtactcattttcgcgtaaagcgccgaaagaaagttatttggtgatcaaacatcatccgatggatcgtggtcacagactctatcgaccattaattaaacggttgagtaaggaatatggcttaggtgagcgaatcctttatgtgcacgatctcccgatgccggaattattacgccatgcaaaagcggtggtgacgattaacagtacggcggggatctctgcgctgattcataacaaaccactcaaagtgatgggcaatgccctgtacgacatcaagggcttgacgtatcaagggcatttgcaccagttctggcaggctgattttaaaccagatatgaaactgtttaagaagtttcgtgggtatttattggtgaagacgcaggttaatgcggtttattattaacagcgccacatcacaaaactctttcaatgaattcaaactatgtgaaaccatcaaaaagctagactctttatgcctttctttaaacaattgagcgcacttctctttaaacctggcatcaccgacagctgttacttcatcgacgatataataatcaaacttaaatgccatgcttaaaccaaagcctaaacgcgatcgcatacctgaggagtaagttttgatcggcatatcaaagtacttaccgagttcggcaaattcttcgacaaactcaattttctctttcagctcttcttgcttcgcgtataaccgcgcaacaaattttacgttttcgcgtccggttaaacttccctggaatccaccggcgaggccgactggccatgatatcgttttattggtgatgatctttccgctatcggggcggtcaatgccaccaatcattctcagtaacgttgatttacccgcaccattacgaccaataaaggcaacgctttttcctgaagggatttcgatgtttaaatccttaaacacatagtgtcgccccgttggcgtacgatatgacttcgtcaaattctcaatcttaatcatgatgtcagcattgcctcctcacgagttcggtataacgccagaccgatgaacagggtgaccagagtgaacattgcaaggtagttcagactcacgccttcgctgatatagccaggcataactgcctcgcggcttaactctacgacatgcactaatgggttccagagtagatatgaccagtattgcttcggaatcgaatgtagagggaacatgatgcaggagatgaaatacagcggcttaagcagtatcggcaggaccttttgcatttcagggaaggttttaccaacgaccatgaatattaagccgatgccacatgaaagaatgattaacaaactccaggtgagcactagttgtaaaaagtttgttatctcgaaatattcacctgccatccagacgataagcatgagcaatatataaacagcaacgtaaatcagcgtctcaagcagtgcgcgtgcaatgatcgtatcgatgggttttactggtcgataattaaacaacccctggttcgcttcaatagcgcctacagaacgattgctgatactgctaaagataaaaaagggaatcaggccattaagtaaaaacaccgggaatgagatgtctggcatcgtgcggtgcataatgtaaccaaaaatgcccaacagtatcagcaaatgcgcagagggttcgagaatcgcccacaaatatcccagacggaacttaccaaagcgtgttcgtatttctcgtagaaataatgcctctacggtgactttctggacttcaaatccacttcttgccatttgatgatgtgatcctaatctcttcaggtacgctaccgcccttggcttaacagctaccaatacactggaggtaatgcttatttgtaactggataaaattcactcagacggtttgacctttttaatagtcgcaaaaaaatttcagcagaaattatttccgcagggataaatagatctatttccgtctcgtttcttctaatccattcttcaggcatgaatggattcggtcttctggtaatttcagaaaactggccgttttagaatgcagatttaatttctcaggaaattatttgaaattattttttattattactgttaactacttgattataataccccctatggattttatgcgtaacaatacctgcaatccgtttcaaaccagaacgcacgcgattgattaccaataaattgttcacaaagaaactatttccctatttaaaattcactcgtgtacttcttatttatatctacagccccctctttacagccatatttgtgatttatatcacatttaaatggtgttatttaagtcgcaccaataatcccgaaggtaattattttcgtcgattaaaatatacatcttgattatttttgtgtatttattttaaccagtgttacaaccaacaccatccctcagtagatatacctgagcagacatttcttaaaatcgacgaatagtttcactggaaattattatgcttatttgaaattccctttctgattatctccaggaattttactaatttccaagcaacacaaaatacagatcacacaagaattatcctatatgttttgacctatcaattgttactcaatgatttattacaactattaataatcataatgtgtcaaaacacttaagcatctttacagtcttagaaaggtgtcgattaacgaaggctacatggtgaaaaacaggttccttcagtgttaccgaacattccgtggtggtctggagggagataaatcttgctacatcggaactcagcccggtgagctggtttgacagttccgcactcaccattgggctaagggttatcaggtggggttaaggaaatggcaatacctacccccgtccaaactccagtcgcagcacatttaccatccctggcttctcagcagcactgacatcaatttgtgtcacccgcagcgcatatttttcatccagtgcgtttaaccatttcagaaggtcattaaacaccacaggttctatccagacctgaatattctccccacgctcggctatccgcttgatgaccaccgagtgcgcggaagcgctgtcactgatgacccgcgatacctgtgcttgcgttgtcgtgccggattttcgcgccgcaataatatccggcgcagtgctcttcagtcgcgcgttcatcgccaccagctgctgcaacatcgtctcctgttgttctatccgctcgctcaacggctgccagatgaggacgtaatatacggcgcaaaacaggaacacggccgcggccagtaacatgcctttttcacgcggcgaacgccccgccaggtgctgtgccagccagtgttcgccacggcttaactggcgttcacgccattgctgaaaatagtgaataaatttatcgcgtaacatgttatttcctccgcaacgttacgccgccggaaaccgcatcaccctctttctgtaacgcgtcctgttgcacaacataatctgccgccagtgcgctacgcagtttatcgaagctggcaaagttcgcagcccgtagctggaggtgaagcgtctggcgtttttgatcaaaggtgaaaccacgcatttcgatgtcggtaagtgacgctgatttcagggtactggcgatcgctgacaattctgcgagcagccgggtatcgtcggcctgtgggcgatattttttcagcgccatcgtcacctgagagcgtaaattcacaatccgcttctgctccgggaatagcgttaagaactgtttctccgcctgggtgcggctttgcgccacctgttcgctgacgctccataacgtcacgccccgttccactgccagcgcaaccagaatcagcaatatcggcagaatcatcacccgccagcgcgcccactgttttcggtagctgacgcgaggctgccacggtccagtcagcaggttcccttccggttcgccataagtggtaatggcgggcagagccgtcactgtcaggcgttcggcgtctgcaccagcccatgcagacagttcttccggtgcaatgccgaccacggttagtgaaaacggtaaatcctgctcattgagctgtgcgcggaacatgaccggagccagcgcccgcccggcgctccatccccggcattcatcgatgcggcagataacccgttgcgcatcgccagccatatagccacaaggaatggacatccagtctggcgcgacggtagcgcgggtgatgccgtttgcctgcaaccattgcgcaatgttacgcatatgctgttggtgaatcactgctacggttgccagttgctggtcgattttcaacggggcgaaatgcagttcatcgatatcctgattcagctcttcttccagcaaggcgggcagaatagtcggtatctgcttgcgggcgacatcaggcagttcaacctgccagacgctgatccattcgccgggaatgtagagtcgaatcgcatcggtttgcagccattgctggagacgttcgtcagcaacgtcaggccagataccgtgttccacatcgggtgtacggcgctgccagcggacggtgtcggagtcgcaaagcgggaaaaaaatctcaaggatggaactcactcactttctcctgtctgatgccagagaacagaaaagtgttgtgggcccatgcggacaattaacgagttcatcgtcagttcaatctcattcacggtgatatctgaacgcagccagaagtaattcctgtccacgctcaggacggtttttagctgttttttagtacgctcatcgacgtctgcgagtagcggctgtgcaagaaactgatcgacatcttcccagcccttcgccggacgttgttgtaataacgcccgcgcctgtacagggcttaaccacgggtcaaacagcgcctcaagaatcacactttgcgtgacatccagggtgttgatgttgatttgctggcgggtcatcggcagcgcacagaccagcggtttcagtttttgataaagtccggcgtccattccctgcaccacgcgcatctcactgatatcggccagcggttgattagcggcgtaaaacggcaccgaacgggcgagacatactcgctgtcttcacgacccagacgcgtctgcacgctgcggtcttcgtcaataaactcccacaggctttcggctatcagttcggcacgataagcaggcacatcgaggcgcgagatcagggcaatcagttgttgtaccgcgagcggacgcgacgccgtcgtcggctgagcgagggcattcaggttaaagcaggcctgtgcgtcacgcagagtgacggcgatttgcccctgcggcagtgggaaaaaacgagggccagaagcccacggctgtgcctgatgcacacgcttttcatttttcaggctcagactgagtgcgctcaacgccaggctttccgcactggcgctgtaccacagcgcctgctggtactcctgctggctgcgcgttcgcccaagttgttgctgcatccgcccggaaagcgtgatggtcaccagcatcataaccgccagcaataccagcaccacgaccagtgccattccgcgttttggtggtgaggtgatcatgataattgcggcccgcgtaacaaccagatgcgttcaatttcgccccattgcggcgaatgcagggttatgcgtactgccacaggaatcgcctgcactgatgaccagctctcctgccagcgcgtgccgtcgtagaactgcaaacggagcgaatccgccgggattaatttttgcgttgttggcttcacgctgcctgccgcatcggtcagtggccaggctaaccgttcgagataaccaccatgaatgcggtaaccgacggtgagcagattactgcgcggcagacgcatcaacggattaaccacgccgccgcgcacaaaacgcatcccttcactctcagacgccagcacgccagcgcccgccagtaacgctggttcacgctggccctgatcgcctcttaccggacgcggcatcatttgtgtcagatcgtggttcaaaaaactcatcgtttgctgcatgaggtttagtttttgatcgtgtccggcgacggcgctattcacgcgtgtaacgccgtttgtcacctgcagcgccatcagtgccagtgaggcaaaaatggcaattgccaccagcatttccagtaacgtgaaaccagcgcaagtccttctcactgttggcctcccacggcgctaaaccaggcgcgtcgtgactgaatcaccgacgaaaagtcttcgtgacggctgacttcaatatccactgcctggagcagcgcgttgcctgtactcagcggtgtggttcgccagtaccagcggcttcctgccatatcactctcgccctggtgcctgaccgctcgttgttcacgggtcatcaggtaaagcagtgcggtctggttttcagctacccagcccgctaccgttttttcttcaaggatttgctgattactcagcgcgccgctggcgatctgtaacaccgccatggcggccaacgcaaaaatcgccagcgcgagcattacttccagcaaggtaaatccacgcttcatggcatcccctcatcacattgattgagggataacacgccatcgtgcgccagctttaccgcccaacacgcgttttgtgccgacgcgtaaaaacgcagtgtaaacggcgtggcgggttcaaaaggcgaaaaacggatctgcggtgtcttctttttcgcctctttttgcagctccagttcaatatcgtgcagcgtcaggcgacgacgctgcagctccagcgcatattccttctgccagatatcacttccgggttgtaacagcatctgcacctgtttcggcaccgtaacctgtgccgataaccgggtcgcagaaacgggcaaccattgcccgtgacgacgctgcataaactggtaacctggcgggtcgattagcacaccgagtgtttgcccttcgatcactgccctgtccttaaactgcgcaaagcgagtcagaaaatcctgcgccgcttttttcgcaggcggctctgaagcggtcgcaaacgtctgtaccacgcccgcactggcaaggccgataaggaaaatcaccagcatgatttccagaagtgtgaatccgcgttcaggcactgattactgaaactcctgcaaattccagttaccgatatctgcgccagcgccctccccgttttcctgaccatctgctcccagggtataaacatcaaacagccctttttcacccgggctgagatactgataatcattgccccacggatcctttggcagtcgtttaatgtatccaccggtacggtagttacgggaatccgccatattggccggttgctggatcagcgcctccagcccctgttcggtagtcggataacgcccgttatccagtcggtacatatccagcgcattctccagcgccacgatatcgctgatggctttttgccgatcggctttctctttgttgcccaacaggttaggcaccaccagacttgctaggacgccaagaataacaatcaccaccatcacttccagcagggtaaaacctgcccgtggtttttgtgtgcgggataacgaattcatgtgataactccgtaaattacattccaaccatattgttcagttgcagcatcggttcgaggatggcgatgacgataaacagcaccacgcccgccatcatcaccaccagcgccggctcaaacagccctaacgccagccccacctgggtatcaaattcccgttcctggttgaccgcggcctgttcaagcatggtttccagttcaccgctctgttcgccggaggcgatcatgtacagcatcatcggcgggaacaggcgcaactccgccagcgcggcgcgcaggctgcttccttcgcggacgcgatctgccgccagcagcagttgttgctcgacataacgatttgccgacacggcggcggcggtctgaatgccttccagcagcggaacactgctggcggtgaggatgcttaatgtgcgggaaaaacgcgccgtattcagtccgcgcgcaacacgccccgtcacgggcaaacgcagcaaggttttatcccagcgcaggcgcatcgcaggatttttgagtagccgttgccccagcaccagaagccccagcaaacccgccagccagtacacgccgctggtctgtaacgtgtcgctcatggcgatgagcattcgggtggaggcaggcagcgcgtgtccgagatgatcaaactgttcgataattttcggcactactgccgtcagcaaaatagtgaccacgcccgttgccaccaccagcagtaccagcgggtagagcatggcctgcagcaggcgtgatttcagatgctgccgctgttcggtgtaatccgccaggcgattgagcaccacgtcgagatgtccggatttttctccggcagcgaccatcgaacaaaacagggagtcaaagacgcggggatgttcgcgcaggctgtccgacagggtataaccttcctgaatccggctgcgcagcgccattccgaggctttttacatgcagtttttcactttgctcactgaccgcctgtaagcaggtttccagcggcattgctgcctgcaccagcgttgccagttggcgtgtgaacagcgccaaatctgccgccgccacgcgacgatgtgcatgccgccgacgctgcaacattccccctgtcgaagcattcagccgggcttcaatgtgcacggggataagctctttaccacgcaacaattgacgggcatgacgcgcggaatccgcctcaatcattcctttggttttgcgaccattacgctccagcgcctgatagtaaaacagtgccattacgcctccatggttacccgcagaacttcatcgagagaggtttctccggcgagcactttctcaatgccgttgctgcggatacccgcagagtgttgccggacataacgttccagctccagttccccggcctgacggtggatcaaatcacgtaatgtggcgtccaccacgatcagctcatggatggcagtacgtccgcgaaaacctttgtgattacaggcgggacagccctgcggatggtacagcgtgacggttcgcgcatcggtaatccccagcaggcgtttttcttcgtcggtggcaggcgcggactggcggcaatcgggacacagcgtgcgaaccagtcgctgcgccatcacgcccgtcagactggaagagagcaggaaaggctcaacgcccatatcctgcaaacgcgtgatcgcccccaccgccgtgttggtatgcagcgtggaaagtaccaggtgtccggtcagtgaagcctgaacagcgatttctgcggtttcggtatcgcggatttcaccgaccatcaccacatccgggtcctgacgcaaaatcgcgcgcaggccatgccgacgcgggtgttaacctgcgtctgaccgatcccttcaatcatgtattcgatagggtcttcaaccgtgagaatgttacgcgagtggttgttcagctcctgcaatccagcgtacagcgtggtgcttttgccggaaccggtcggccccgtcaccagaaaaatgccgtgcggtttgtgtaacagctggcgcaactgcgcagtcagttcgagacttaaacccagacgctccagcgtcaggcgagcctggtttttgtccagcagtcgcagcaccacccgttccccccaggcggaaggcatggtggagacacgcacgtcaatcgcccgaccgcccagcagcagcgcaatgcgcccatcctgcggtacgcgtttttcggcgatatccagccgtgccatcaccttaatacgcgataccagcagcgaggccagtttgcgccccggacgcagcatttcatgtagtgtgccgtcaacacgaaaacggatcaccagactcttttcaaacgtctcgatgtggatatccgaagcgccttctttaatcgcctctgccaacatggcgttgatcagtttgatgattggcgcatcgtcgtcactttccagcagatcttccgtttccggtagttcttctgcgagagtaaaaaagtcctcagcagaaccgagatcttccatcagctggcgggcctcggaagagtcccgctgccagaccgcattcagccgctgttcaaattcggcctcgtcgatttgcctcagcgtaaaagacgcgttcagcccccgctgcagctcctgcaaaacagagagcgacaacggatgaacatggaggatctccagcgacgcttcgcaccatgccaccaggctaaaccgacggctgaaactgtagggcagacgcacggtgttagcggtggtttcctgtgctacaggcaccattaacgcgttctcccggcattaaggaacgcgcgaacttctggcggtagagcctgattttgcgctggcagtaccggctgcgcggtgtgcggcatcaggctcaagccttgctcatcgcgatagatctgttcggcgcgcatatagttatatttgcgctgcgacacgccgtctgccgccataccgtcacgcagaatggtcgggcggataaataccatcaggttacgtttttcttttttatccgccgtcgatttaaacaggttaccaatcaatgggatatcgccaagcagcggcactttcgccacgctttctcccgcctgatcgtccatcagaccgccaagcacgatcagctcaccatcgtttgccagcacggtggttttcagtttgcgctcgccaaacacgacgtcgagactggtctgtccttccaccttcgacacttcctgctcaatcaccatctgtaccgcgtttccttcgttaatctgcggcgtgactttcagcatgatgccgacttttttcctctctaccgtattgaaaggattgctgttattagagccaacagtagagccggttaataccggaacgtcctggcccaccatgaagaaggcttcctggttgtccagcgtggtgatactcggcgtggagagcacgttcgagctggagtcgtttttgaccgcctgtaccagcgccatccagtcgcctttcaccacgccaaccgccgtaccgctaaagccagaaagaagctgagcgagcgtggagagatcgccgttagtatccgggttaatggtggtagcgccgttttcactgatcaccgtggagcctttctgcggttttgcctgagaaatggctgcacccagcgtgccaatagggatctgcgtaccgttagcaaactgcattaatccggcatctttcgacgcccactgcacgccgaaattgatattgctaccttcggcaacttccacgatcaacgcctcgacgtgcacctgagcacggcgaatatccagttgttcaatcacgctttgcagcgactgcatgatgtcctgcggcgcggtaacaatcagggcattactgtgtttgctggcggcgatggagacaacctcacgcccgctaccgacggtgccttccgcctcttctttagccgccgtgagcgtgccgctgacctgcttcagtacatcgaccagatcttcggctttgctgtatttgagatagaaaacctggctgttgccgctgcgttccatttctgagtccagccgacggatcaggcggcgcattttgtcccgcgtggccgggtcaccactgacaatcacactgttggtgcgttcgtcggcgacaatttgagatttcagcgtcgcaggctggttctcgccgctgtttttcgtcaggctttccagcacgcgggcgatttccgaagccgaggcgttatccagcgggatcacctcttcggtgcgattacccgcatgatccacgcgctggatcacttccgtcaggcgctccacaactgaggcgcgtccggtaagcataatcacgttggagggatcgtaattaacaacgttgcctgagcctgcgctgtcgatcatctggcgcagaatcggtgccagctcgcgtaccgacacattacgtaccggcacgactttggtgaccatttcatcgcccgcgtagttgtcgctgccttcaccaaccagcggcagcggctcgactttcgcggcactggatttcaccaccttcagcacgtcgttttccatcggtacgacggcatacccctgtgcttccagcaggttaaggaatagctggtaatactggcgttcattgagcggggtcatggtgcgaatactcactttcccctgaacgcccggccccataatgatggttttattaaggttagcgccgacggtttcgatgaacgatttcaggtcggtatctttaaaattagcggtgaaagtggcttcttccgcccagaccggtgaactgcataatgccgctgccagcaccagcgccagtaaacgcttttttgttttgaggccagttgtcttcttacgccagaccgacaacgtcatatcacgccaaaacacgatgaatgattctcctggattaaatgcggttagcgcagcgcgatggaaatgtcgtagcgcgcacccttgcgtaaaaccgtaagttgaatggaatccattgaaggtaactgccgcatcagagcaatcattgctcgtggatcagtgaaatcctgctgatttagcgcaatggcgatatcgccttccttaaaaccgctggcatcgaacagagaacgatctgcccccggtttcactgcataaccgacaatcccttccttacgcacaggcgtaagctggatatagttaaaaattttctgcggatctttcgccagtgcctgacgcacggcagccgggatctcaactggcgcactggcagcaggctcagcaacagcttgctttgcttcgtcgctgacggcttttttgctggtcacggctttggtgggacgcttctcttctgccagactcagacgttccattttcccctgatagcgcagcatcacatggtcacgattaatttcctcaatcaccgcgttgtgagagccaagccgttcgccctgtaaatagacctgctgtttgccgccttcttcaatcaccgcgccgggtctggcaccaaaggcgatcccgcgcagcaccacattaagacgcgtttctgccacaggcgcaggttcgggttgttttaccggtgcggcgacgggttgatatttgccaaaccagttttgttggctgactaattgcacgtcatttttatcgaacggttttgcatccgcacggagcggtttattcgccgatgaggaaaccgccgtatattccgcagaaaaggagaaatagcgccagagtgaatacgccatttttgcagaaataataagcagcatgagccagaacatcccgcgcaccatttttcgcagatgctctttgtctgtattaagagattgtctctggctaagagtgtgacgaatttttgtcagcaactgaatgagataaattcgtgcgtcacgaaaaacaacccgcgccaatttatatctacccgacgttatgctttgactattccacaggtggtacgatccagtttccgctgatactggtttcctgtacgtgtatcattaatcgttatgctgtaattaattccctcggtaatcattaatttcaccgtcgggtcagcgcacatttgtcgttgatagctggttaaaaaggcatcaggtgtctgcgtggtctgagcacccgcttcgctgataatggtcatttttaccgtcgtgccgctactttgcgccagcactaaggtatatcccgcagatttaatcggcaggttttggctgatattttgcgcctgttttttcgccagtaaactggcattttcattatggccggcacagccacttaataatcctgtaacgctcaacaatagcgatattaataccctccctggcatttgttttatcgacatggtaaataatctctaaggttattaataagagttaaaatgtcactttgataatgacgtggttatcattaaaacaatgcctgtagataaagtgttgctataccgcccagacttaaacacggtccaaaaggcagtgtggttgatcctctttttgtaataacggcatatatcaggccgcagcatgatgcgattaaagcaacattgggtagcgacaacggccccacccagccacctaacgcagcgaaaagtaatacatcgcccatgcctaatgcttctttacgcagaactattccggctatccagcgcagggagtaaaaagtgataaaccccaccaggacgccggtaactgcgtcttgtagcgttaacggactctgttgcgcccatgccgcaatcagcccggtccacaatacgccctgagtaaaaacatcgggcagccattggttatcgaggtcaatgacgctcgcggcaatcagccaggcggataatatcatcaccgccagcccccatccactttctggccacaccagactcgccagcaaaaaagcgagtgccgtcaataactccaccagcggataacgcttgctgattttcgcctgacagtcgcggcagcgccctttgagcatcaaccatgagagcagcggaatattgtcacgaacgcggatggtctgctggcaatgcggacagtgcgagcgtggcagcgccaggtttatttttgactgcgtactcggcatttcaccgtgaaactccgccatttgttggcgcagcatgatggggtaacgccaaatcaccacattcaaaaaactgccgatgatcaatcctccgacggttgccagtatgggcatccccgcggagtattgctgaaaaacatcaaaaagcatggttaaaggttgtttgttgtaacttgccggatgcgggcctgcgggtgtatgccatatggctttcctccaggcccgatgcgccttatttcatgccggatgcggcgcgagcgccttatccggcatacaggcttactcagctgacatcttatgctcggtaacctgattaatggtttccggcccttgctgcggtttcggcagattaagcgccgccagcgtctcgtaagccgactggctcacaccgccctcgaagttcatctcgctcgctcccggtaactggtaagcattcgcgcccggattccatttcttaaagaactccgaaagatccgtctgagcgacccaggaggcacacagcatcagcttgtcggcagcgttaccgttggattcggcacagtaatttctttcgccaaacttggttttgccaacatcatcgccgcgtgctttacggtgcatcaactggaacaggttccagcctttcatcccttcacgatcgctgtagaactcaggcaggtcaccttctggataccactgtttgatatcaaagtttttctctgcccactccttcagctgcgcgtacatcagcagacggtcgcccgcaccgccgcgcgcccatgcctgaccgttgctctcctccagatattccggcgcgacagtaatatcgtcagcgacacggttcatcttgccgagatagcgatcctgcatgtacagcgccagaacgttgttcgctacttcagttgcgccaggaacagtcagcggcgtttcggcggcgttgtgccctacttcgtgccagatcaaccagtcgttcagcggcgtcgtcggcagcgtggtgctgttcgtcgagaagctgctgttcattaccggataacccgagtgcgcatcaccgatggagatctgcacatcgttggtgaaacgatgcttgtgccccgtcaagtttttataggtaaacatccggtgcttaccgtcttcatcattacgaccgtagaagtcattcatcgagctggcaaaggtatccagatctttagcgaattctgctacaccaccagtgaaattgctggcctcaaggttcttcttcggcgtggtataaacgaaagcgtctgattccagctcgcccagcggcgcaggggagttcagagcgtttttccattcgccgtctttatagaacggcgcttttaccacaccagtaaaggtgaattcggctgactcattctttgggctgttgcccttgatataaatcagaccaccgtaaggcaccttgaaggtcaccttatcattggctttcagatcataggttttcgtcacttttggcggacggttcagcgcgacttcatgcttctcgcgtccggtcagatcgtcggccagcgccacggtgacagtcacaggaactgatgcagaagactcaatggtgacctctttctgagccggagcccacaggccagtagactgcatgttacccgcaaaccatttggtcggattggagtacaggctgatggtttcagtaaccttctcaccttctgccgataccgctcccggatacttctcgacatcaactttgatgttcagatcccaccaggaacgacccagcatcaggcgcgtcagcggtttttccatatagttgagcggatagctcgggttcatcatgcccgctttattaacgctcttctcgccgtagatcatgttgttatcgaccagcgattttttcagctcatcagaacactgcgtgccgccagtataggcatcgttggcgtagcagttcaggaactcggtgaacgttttaaagcccagctcgtcatccttgtcgttttcatagcgatattcaattttattccacagccagaccgacacgttctggtacagacgttccagatcgacgctgctcagacgctcacctttgcgaccattggtccggaagtagagctcatgctgatacagacgctgaatgttggtgcctaaatccgcagcctgcaccatcgcttttgccgtgtcggcgttaaggcttagttgcgtatactgtggaacatacatgccaccagtaaccggaacccccgtgccaggacgatattccagacagttgacctcgtagtggtaagttgggtccttacactcctttaatccaggaaacttctcaaagatttttgccttcgcagccttcagagaatcctctgttttatgatcggcctcatcaataaaggcataacgcgtttcctgtttgccatctacatcttccagccagctggcaacttccagcttcggtttgtcatcaggtttgttttctacctgatatttccacttaacttcccctgtcttactatcgatggtgtacggcagcgcaccatctacggcaggataacgttcatagacccaaatgcccgttgcgcgctgctgacgaacgcggttcggatacccttgcggatcgttatttactaccgacttgttcagtgccatcgacagacctgcggcatcaagcagacgtacaaagccagacgcgctctcttccttaagattgctcatcacgttttccatgatcagcaccgatccacctttgttcagataggcgatcagatcggtcacatcctgctgagtcagcttcggtttgctggtatctgctcgcagcgggattgcataaggatcgttaccaacctgagtcacatactcaaagccgttgaggatcagcagcggcatttcctgcgggtcgagatcgccatagctacttaaatgctcaacagagatacccgcaaaatccggatgaaagccgaactcagcgctgtttcctgtaacctgaccatgacgtttgaaatagacagtatccaggttggtgcctacggtcatgctggctttcgcgtccggcgtccatttatcgtcggacagatagcgcaacacgttctgcataaagtgcttcatatcattagaatcactgttacgcgtacactgaccgtttttatcaacaccgccttcccagctgtaaccgttcggacaacgcaaaatgctgttgtagtgcgggttaccgataaccatcagtttgccctcaccgacttgccccagcgaaataaacggcaggttaaaggtggcggtatcgcgcgtaacgttttccggctcaacgagagaaggcgcttccgtaatgtacgccagctcgtttttatcccaggcgcgtttttcgccaaacgccagccagtagtttttatcattacgcgccatcagaatcgggaaggccgcgttggagatattcaccactgcctgaccgcgcgcattaccggtactgccatagaagttggtagagtcatggaagacgtggaatttcgtcactgatttgtaatctttatccacaccccacagcttgttgataacgccctgaatctgaccttcgttaacattgcgtgctgtcaacgagaaccaacgctgagagttgcagcccccaagggagtcacaaatcgccgtatcaatctctttagcctgcccggattcaaactgctcaagaaattcgtttgtccgctcaaaggtttgatcgccttcgctcaacgcctcgccattggataacgagagattgataatctcgttgattacgttgggatactcggcaaagaccttgcgcactacgtccggcacttcacgctcatcattttttccggcctgggagtaacgatgaataagctgatcaatattcgcgccgcgaacttcgtcacccagttcagtcaacgcaatggtcgacttattgccgcgcactgagcccagttcaaaggtgtcgataccaaaggagatggtttcgccccagctgaagttgaatttgccgttttcgccagttacgccacggcctgagctggtgtagtaatttacgccaaccacaccattgcccatgctatctaccagtcggccttcggagagaatgatttcagtgggttgatactgataaaactgttccgcgttagccgacacgaaggaagcgttcagatccggttttgttcccggcgtggtgacgggcacaaccggtgaagtatgagtggatggcgctttatcggtcgcggcattgttttccacctcttcattgaccagctttttgaactcttccggtgccagatcgatttgcttatacagcgagtcgaaacgtttactctcgatcactgaggagaacgtcaggcaaacctgttctgtattcgccggacagctgttactggacgttaccagcgaaaccgcattgcttttcttgtcatcggaagctgccagttcttgcgcgtcctcaagactaaacgacactttttcaaccgcacgcaggctacgcgcagcttctgactgggtgtcgaaggtagcaattgtcgtgttacccgccacgcaagtaacgtcctcaccaggtgtaaatgtaaagccatcgctggattcaccattacaagtagcaccagttacccgctggcttccgcccagggtcagataacccgttttcgtaggaacaggttctggctccggttctggctcaggatcaggtgtcggttccggcgtaggttctgggtccggcgttggctcaggcgtcggctccgggtttggtgttggatcaggtttcacttccggcaaagaccctgttccagaatctacaggcggcgtatcggaggaagatccggagccaccgccatcacaaccggctaacagggttgcactcaaaatagccgctaaaagcgatttcttatatttaaatttcttattcattaataacgcaagtgacaaaacaaagttaaaagattcgtaaccggggaaatagttttatgctttatcttctttaataacttcctccattcttaagaaaacggcatcattgatagaaaaacaggtgaaatttataagaataacccctattcgatgtctggctggttatttttacgaaatttcaataaacaaaaaattaacaacttttcacaacgtaactatataaatttgttggtagttttaacgattaagattgcaaaagcaacagatagaacggtgtttgctcatcaagcgaacataattaatactgacttgttttgcgtgataaaaaaacagatgttctcacgcttttaattatttagcaggttatctgaacgcgaaacattattgccacatggataataaagcgggaaataattttccattaataagacagagtaatgtaacaacgaagccggatgatattaacgatcatccggctttattaacttacgaaactaacatcccggtaaacacatacgcctgcaacagcgtgataatgccgatcacactggcaaagatcagactgtgcttcacggtgtagcggaacagttcagattctcggcccaccatgcccgtcgcggcgcaggccacggcgatagattgcggagaaatcatcttgccagttacgccgccgctggtatttgctgccaccagcagagtgtcagagacgttgatttgctgcgccgtggtcgattgcagtgaaccaaacagagcgttagaggaggtgtccgagccggtaaggaatacgcccagccagccgagaaacggtgagaaaaacgggaacatcacgcctgtacctgccagtaccagcgccagcgtggtggacatgccggaatagttggtgacgaaggcgaacgccagcaccatgccaatcgacaatatcggccacttcagactaattagcgtttcggcaaagacgccaatccctttcttgatgcccatgccgaggatgaagatagagataatcgccgcaataaaaatagcggtgccgccagccgagagagggtcgaatttaaacaccgcatccattggcgttggttgggcgacaatgggtgccgctttcaacacttgttgatgcaaatgagggatctggaaattaatcaccagtgaataaaacgcgccgcccggagcaaataacgctttaaacggcttcatggtccagatggtgaccagcaccgttaagattaaaaacggtgaccacgcacgaatgatttgccccagactatattctgaaggcacgggaccgccagaagatggtttattcaccaccatcgcacctgcggattgtcccatgctgattgccgtttcggtatttttcggccgccagactttaaggaataaagcgagtgagacgatactcaccagcgccgaagtaatatccggcagttccggaccaatatagttagaggtaaagaactgcgtgacagcgaagcttcccccagcaaccagcgccgctggccacgtctctttcacccctttccagccgtccatcattgctaccagccagaacggcacaagaaccgacaggaacggtaactgacgtcccgccattgcgccaatgtggaacggatcgattcccgttacctgaccggcgaccagaatcggcacgcccaacgcaccaaacgccaccggcgcagtgttggcaatcagacacagccccgccgcgtataacggtttgaagcccaggcccaccagcagcgcaccggtaatcgccaccggcgcaccaaagccagccgccccttccagcagcgcgccaaaggagaaaccaatcagtaacacctgcaaacgctgatcgtcagtgatggagataaccgagctgcggataatatcgaactgaccgctggcaacggttaatttatagaggaacaccgccgcaacaataatccacgcaataggccataatccataaataaagccatagcccgcagcagcaaatgccatatcaatcggcattttaaaggcgaatatcgcaatcagaatagataatataagggttattgctccggcgacatgtcctttcagacgtaataccgcgagtgcaacgaagaagaatattatcgggatcagggcgaccagagcggatagccccagtcctcccatcggcatatacatttgggtccaggtaaccatatttttcagtctcttattatctttatatgcttgatatacttaaggttgtaataagcaaaagaggactgaactgtaaaatataggcgttatactttacagcaacagtacgctgctaacgcaattgctacctctggcataacaagtatatcgggtaagggtttctgttccgcacacgcaggcgcagaatatcgttaagatgtccatattgttgttttaggcccgctagtaatgcgctacgggtatttaatattgttaaaccctgataatcgctccggttatttccgggataaatgtactaccgcagttactatcatagccccgacaataaaacttgccggggcttttttgacgctattaatgactttctttttcgcgtaaacgccaggcgtgtaataacggttcggtatagccgtttggctgtttcacgccgaggaagattaaatcgctggcagctttaaaagcacacgagttagcgaaattccccgacatcggacgataagccggatcgccagcgttttgctgatcaaccactttcgccatattctccagcgacgcctgcacctgttctttggtcagaatactgtgacgtaaccagttggcgatatgctggctggagatacgcagcgttgcgcggtcttccatcagcgccacgttgtgaatatccggcacttttgaacaaccaatcccctgctccacccaacgcaccacgtaccccagaatcccctgcacgttgttatccagctcttgttggatctcttcaaccgaccagttagcgttttcagccaccggaatagtcagcagatcgtccagcagcggttcaaattcagcattgaactcgctctgggcaatgttggcctgcacgctctgtacgttggtttggtggtagtgcagcgcatggagcgtagcagcggttggtgacggaacccaggctgtgtttgccccggcacgcagttggtcgcccttctggctgtacatgtctgccatcaggtccggcattgcccacatccctttaccgatttgcgctttaccgcgcagcccacagaacagaccggaaagcacgttattacgttcgtaggctttgatccacggcgtcgatttcatctggtttttacgcagcatcgggccagcttccatcaccgaatgcatttcatcgccggtacggtcgaggaaaccggtattgatgaacgccacgcggttacgcgcctgagcgatacagctacgcaagttcagcgaggtccgacgttcttcatccataatgcccattttcagggtattcggtgccataccgagcattgtctcaatgcgggtaaacagtttgttggcgaacgccacttcctgcggaccgtgcattttcggtttcacaatatagacgctgccagtgcgcgagtttttctgcacttttaaatcatagagggcaatcgcgccagtcatgacgccatcaagaatgccttccgggatttcattgccttcgctgtcccaaatcacaggaatggtcatcaaatgacccacgttgcggataaacagcagcgagcgtccgtgcagagaaatttcagagccatcggcggcggtgtaatgacgatcgtcattcagtttacgcacgatttgccgaccgtttttttccattttctcttgcagagtcccctgcatcaggcccagcaggttgcggtacagcaggattttatcttccgcatcaaccgccgcgaccgaatcttcgcagtcgagaatggtactgatggccgcttcgacgataacatcgttgatatgcgccggatcgtctttgccaatccgcccgttggcatcaatttgcagttcaatatgcagaccgttatttttcagcaaaatgcaggtcggcgcagcggcatcgccacggtaaccgacaaactgcgccggggtacgtaacgtggtttctttaccatttttcaactggatgcgtaattgtttatcgaccaccttaaacgccaccacatcctgatagctgccgttttccagcggtagtgattcatcgaggaaacgccgaacccaggcgataacctgctcaccacgctgcggatcgtagccgctgaccatcgccccttcctgcgggatgatgtcgctgccgtataacgcatcgtacagtgagccccagcgagcgttcgccgcgttcagcgcgtagcgggcgttcattgccggaaccaccagctgtggccccgcctgactggtgatttcgctgtcaatgcccgtggtttccaccgttacgcgctccggttgcggcaccaggtagcccagttcacgcaggaaagatttataggccgctttatcttttaccggccccggattgctgcgatgccactcatcaagcgccgcctgaatgcgatcgcgttctgccagcaactgacgattttctggtgccagatcgtgaacgatctcatcaaaattgcgccagaacgccgcagcgtccagttccacgcccggtaaaacttcttcatccacaaaacgtttaaaattggcgttaatgcgtaaacggccctgggttatggtttgactcattgtttctctcctcgttttcgcttatttcgccaacaccgctgctgccgctttcgcgacctgcgcatcctgtgctccggttaaaccagaaacgcccacggcaccaataatttgcccatccacaacaaccggtacgccaccttctagcgacgttaataacggcgcagtcacgaacgcggtacgtccgttgttcaccatctcttcataccccttagtttcacgacgccccagcgcggcggtacgcgctttctcctgggagatgtaagccgcaatcggcgcgcaatcgtccatgcgacttaacgccagcagatgaccgccgtcatcggcaacagcaatggaaacagaccagttgtttttctgcgcctcttcctgacctgcggcaataattgcactcgccatttgctggctaagaatgactttagttttcattttgttattccttttcaagggcttgttctacaatttcaatccagtgacgcacagaggtacgaccggcgctcgccagatgcgtctggcaaccaatgttggcggtgacgatcatttccggtttgccgctttccagcgcattcattttgttatcccgcagctggcgcgccagatcgggatgcgttaacgcatatgttcccgctgaaccgcagcacagatggctgtcgggaacgtccgttaaggtaaatccaagacgaagcaacactttttccacttcgccgttcagcttttgcgcatgttgtagggtacacgggcagtggaaggccagttttttatcgccgcgaattgccagtttttccagcggttcctcgcgcagaagttcgactaaatcgaccgccagctcactgacctgacgcgctttatcggcatacaacgcatcgtttttcagcatctgcccatactctttgacaaacgcgccgcagccgctggcagtctgcaaaatagcctcggcacctgcttcaatcgcgggccaccaggcatcaatattattgcgcgcccgcgctaaccctttctcttgcgcattaagatgatagtccaccgcgccacaacagcctgcttcgttagctggcatgacgctgatccccagacgatccagcactcgcgcagttgccgcgttggtgttgggcgaaagcgtaggctgggcgcagccttccagcattaaaacccgacgcttatggcgcagcggtggacgcggtttagctttcaccgtttcagcaggcagttttgctctgacctgttccggtaaaaacggtcgcagcaccagccctacctgcgtcagcgcacggaagaccgccggacgcggcactacctggcgcaatccttcgcgcagcattcgctccggcagtgggcgtttcactttctgctcgacaatatcacgcccgatatccagcaaattgtgatagcgcacaccagaaggacaggtggtttcacaattgcggcaagtgagacagcgatcgagatgctcctgtgttttaagcgtgacgtcgttgccttccagcacctgtttaatcagatagatgcgcccgcgcggcccgtccagttcatcgcccaggagctgataggttgggcaggttgcggtacaaaatccgcagtgaacacaggcgcgcaggatgctgtcggcttccagcgcccgcgcgttctgccgcatctcttcggttaattgggtttgcatagcctgctccttaaagctccgcgtacatgcgaccgggattaaacacgccgcaagggtcgagctgctgtttaagctgctggtgatagcggaataaaggagccggtagcggggcaaaaccaccatctccggcactaaagcgggtcgcatgaccgccagcgttgcgggcaatgcgatggatttgattgtcatcggctgtcgatttcagccagcgtaacgccccgccccagtcgatcagttgctcgccgggtaaatccatcatcggcgcatcgctgggtaaggaaatgcgccataaggtacctggtaacgagaagaacggcagttgttgttcacgcaattgctgccagaactgacccgcaacctcttcgccccccagcagttcacgcgctgcttttaccgatccttcgccgccctcaaggcggatccacaacgcattgtcgaagtaacataagccactaatgggtaatggctggagttgccactgggcgatttcattcatggcttcttgcaggctgatttcccgacgcagactcagggtggcgcgtggtcgcggtaacactttcatcgagatttcagtgagcacacccagacaaccgtagcttccggccattaaccgtgagagatcgtatccggcaacgtttttcatcacttcaccaccaaaacgcagatgttttccagtgccggtaatgatgcgcgtgccgaggacaaaatcgcggaccgaaccactccacgggcgacgcggccccgccagcccgcaggcgatcatcccgccccaggtagcttcttcaccataatgtggcggctcgcaggggagcatttgcccggcgctctccagcgccgcttcaatcgccaccagcggcgttccggcacgagcggttatcaccagctcggtcgggtcgtaattaacaatgccgcgatgacaacgcacatccagcgtttgcccggtgacaggacgacctaaaaaggctttgctattgctgccctgaatcaccagcggcgttttatcgctaatcgcctgattcacctgctccagcagcgcctggctgtaatcacactcgcgtagcatcagaaacgctccagttcagggaaaggtaaatgaccgtgatgcacatgcatggcaccaaattcagcacagcggtgtagcgtgggaatgtttttcccagggttcagcaaaccatcggggtcaaacgccgccttgaccgcatggaaggtcgtgatttcatcgctgttgaactgggcgcacatttgattgattttttcgcgcccaatgccatgttccccactgatgctgccgccaacttcaacgcagagttcgaggatcttcccgcccagctcttccgcgcgggcaaattcaccgggttcgttggcatcgaaaaggattaacgggtgcatgttgccgtctccggcatgaaagacgttggcaacgcgtaaatcatattgctgcgataaacgggcaatgccttccagtacgccaggcagcgcgcggcgtgggatggtgccatccatacagtagtaatccggggaaatgcgccccactgccgggaatgcgttcttgcggccggcccagaaacgtacgcgctctgcttcgtcctgtgccagacggacgtcagtcgcgcccgctttcaacaagatgtcgttaacccgctcgcagtcttcctgtacgtcagactccacgccgtccagctcgcacaataaaatcgcttcggcatcgacgggataaccggcatgtataaaatcttccgcagcgcggatcgacaggttatccatcatctccagcccgccggggataatgccattggcgatgatgtcaccaaccgcaagtccggctttttctaccgagtcaaagctggctaacagcacccgcgccacgggcggcttcggcagcagttttaacgtcacttcggtggtcacgccgagcataccttccgatccggtaaacagcgccagcaggtcaaaaccaggcgaatccagcgcgtccgatcccagcgtcagcgcctcgccatccagcgtttgcacttcaattttcagcaggttatgtacggttagaccatatttcaggcagtgaacgccaccggcattttccgccacattgccgccaatcgaacaggcgatttgtgaggacggatccggcgcgtaatagagattatgcggcgcaacggcctgggagatcgcctggttacgcacgcccggctgcacgcgcgcacggcgaccaacggggttaatgtcgaggatctctttaaagcgcgccatcaccaacaacacacctttttccagcggcagcgcgccaccagaaagcccggtgcctgcaccacgggtcaccaccggtacacgcaggcggtggcagacagccagaatcgccgtcacctgttccatctgcttaggcagaacaaccagtaatggacgcgtgcgatacgcgctcaacccgtcacactcgtaaggaatgatctcctcatcggtatgcaggatctcaagtccagggacatgctcacgcagtgccatcagtaccgatgtgcggtcgacatcgggtaaagcgccatcaagacgctcttcgtacaagatgctcatgagtaggcttcgctttgttgtgttgtgtggcagctgattttttcgcgctgcttctgtgaacagttattaagcgggcttttcgttttcgtctatctctttagctaccggtcagaccattttttttccagctctgtgaccttgtcttggttaacttaatgttaaattgatgtaacataatcacttacgtgatgtgcgtgttttgcgagttaagaacagaaaaattggtcctacctgtgcacgaggtccgggaatgaaagatgaacgtcgccctatttgcgaagtggttgcagagagtatcgaacggttaattatcgacggcgtactgaaggtcggtcagccgcttccctcggaacgtcgactgtgtgaaaagctcggcttctcacgctccgcactgcgtgaagggctgaccgtgctgcgcgggcgcgggattattgaaacggcgcagggtcgcgattctcgtgtcgcacggcttaatcgggtgcaggacaccagcccgctgatccatctgttcagtacgcagccgcgaacgctgtacgatctgctcgacgttcgcgcattactggagggcgaatcggcaaggctggcggcaacgctgggaacccaggctgattttgttgtgataacccgctgttatgaaaaaatgctcgccgccagtgagaacaacaaagagatttcgctgatcgaacatgcgcagttggatcacgctttccatctcgccatttgtcaggcttctcacaatcaggtgctggagtttacgctgcaatcattgaccgacctgatgtttaattcggtgtttgccagcgtaaataatctctaccatcgaccacagcaaaaaaagcagatcgatcgccagcatgcgcggatctacaacgcggtgttgcagcggctgccgcacgtcgcccagcgcgcagcacgcgatcatgtgcggaccgtgaaaaagaatctccacgatatcgagctggaaggccaccatttgattcgctcggcggtgccgctggagatgaagcaggggtgactgccatcaaatctgcttttcatacaatcggtaacgcttgtacggctccgccccaatgcgttccagcatgttattcatgcctgtattggtttcgaggatccatgacatctccagcgcatcgatcttccggcgggcaaacggatcgcgtaaggcttcaatcaataacaacgcaatcaccgggccgatgcggctgaactgatactcgtcccgcacgcccatcagcggtactcgcgcagttcgcacaccgctgacttttaaacgccacagcaattttgcccagccgaagggaaagagcgatccgttcagatcggcaatcgcctcgttgatgtttggcaagccgacaataaacgcgcagggtgcagaatcaatctcagcgatgtagatcatatcgtccggcaccagatatttaagttggtcgcccatggtcgcgaattcatgttcggtaaacggcacaaatccccagttgtgctgccagccagaattgaaaatctcacgcaggatctgcatctcttcggcaaaccgctggcgattgatgcagcgaatggtcaccttcttacgcacctgatccatcagtttttttagcgccggagagaaagtgagatcggttcgctgcatccaccacgccagtaaatcaatgcctttgtgataacccaattgttcaatatgcgcggcataccacggtttaccgtgcggcatcatcgcacagggtggtgtatcgaaaccttcaatcagtaatccgctttcctgattgatattcaggctgaaaggaccgctgatcttacttgcaccttgtgacttcaaccacgcttccgctgcgccaaacaacgcggcaaaaacctgcggatcatcaatggcgtcaatcatgccgaaatgaccggtatctttgccgtaacgctcgcggtgcaaggtatctatttgcgcggtaatacgcccaactatctgccccgctttttttgccacccacgcctgccagatgatatggtccgtccccggatttttcgcagacaaatgctcgttgcgttcaatgaataaagggggtatccagtttggatcgtcgggataaagtgatgacggaaaagcgataaatgccttaaggtcatttttattaattactttttcaattttaatcatcagcagatcgcattccatatctctgttctgtggataacaaataattaacgatgaaaaacaggttgcaacagcaacgaacggcatcttaataatcaacaccatgaatacaaaataagaataaatattatttattaatgattacgataagatcacagcctacgaagaagcgccacaatgccttttagcgatttaatgcggtcagacaaggttcattcttaatacattcataaatcaaatatcattcacaataaaaacaacaaaacacaaacttattatttaaatcaatgttcaatatcgcaccgatgaaaatactatctcatttatcttttatgcctatataatccaccgcattattgtcattttatttttgatatccaattttttcgtggtgtatatgtctaataaaatctttacgcattccctacctatgcgctatgccgattttccaacgctggttgatgctttggactatgccgctctgagtagcgctggaatgaatttttatgacagacgttgccaacttgaagatcaactggaatatcagacgttaaaagcgcgtgccgaagctggtgcgaagcggttgttatcgctgaacctgaaaaaaggcgatcgcgtggcactgattgccgaaacgagtagcgggtttgtagaggctttttttgcctgccagtatgccggcttagtcgccgtcccgttggcgattccaatgggcgtcggtcagcgggattcctggagcgccaaactgcaggggttactggcaagttgccagcccgcagccattatcactggtgatgagtggttgccactggtcaatgccgcgacgcataacaatcccgaattacatgttttaagccacgcctggtttaaggcattaccggaagccgatgttgcgcttcaacgtccagttccaaacgatatcgcctacctccagtacacctccggcagcacccgttttccccgtggcgttatcattactcaccgcgaagtgatggctaatctacgtgctataagccacgatgggattaaattacgccctggcgaccgctgcgtctcctggctgcctttctaccatgatatgggactggtcggctttctcctgacccccgtcgccacgcagctttcagtagattatttgcgcactcaggattttgccatgcgtcctctgcaatggcttaaattgatcagtaaaaatcgtggcaccgtttccgttgcaccgccgtttggctatgaattgtgccagcgccgcgtgaatgaaaaagatctcgctgaactggatctttcctgctggcgcgtcgctggtattggcgcagaacccatatccgcagaacaactccatcaattcgctgaatgtttccgtcaggtaaactttgacgataaaactttcatgccgtgctacggactggcagaaaatgcgctggctgtcagcttctctgatgaagcctgcggggttgtggttaacgaagtggatcgcgacatcctcgaataccagggtaaagccgtcgcgccgggtgctgaaacacgcgccgtatcgactttcgtcaactgcggtaaagcgttgcctgaacatggcattgaaatccgcaatgaagcagatatacctgtcgcggaacgtgtggtaggccatatttgcatctccggccccagcctgatgagcgggtactttggcgaccaggtttcgcaagacgagattgccgcgacgggctggttagacaccggcgaccttggttatctgctggacggttatctgtatgtcaccggacgcattaaagatctgattattattcgtggccgtaatatctggccgcaggatattgaatacattgcggaacaggagccggaaattcattctggcgatgcgattgcttttgttaccgcccaggaaaaaatcattttgcagatccagtgtcggatcagcgacgaagcacgtcgcgggcagcttatccacgcgctggcagctcggatccaaagcgaatttggcgttaccgcggatatcgatctgttgccgccccacagtattccccgaacatcctccggcaagcctgcccgtgcggaagcgaaaaaacgttatcagaaggcttatgctgccagtcttcatgtgcaggaatccctggcatgaatcaaactgtcgcggtgacgggcgctaccgggtttatcggtaaatatattattgataacctgctcgcccgcggctttcacgttcgcgcattgacgcgtactgcccgcgctcacgtcaatgataatctcacttgggtgcgcggttcgctggaagatacacattcgcttagcgaactggttgccggagccagcgcggtggtccattgcgccgggcaagtgcgcgggcacaaagaagagatttttacccgctgcaacgttgacggcagcctgcgcctgatgcaagcggcaaaagagagcggcttttgccaacgttttctgtttatctcttcgctggcggcgcgccatcccgaactctcctggtacgcaaattccaaacacgtcgccgaacaacggctgactgcaatggctgacgaaattacgttgggcgtttttcgcccgacagccgtgtatggtcccggcgataaagagttaaaaccgctgtttgactggatgctgcgcggtctgctgccacgacttggcacgccagagacactgctctcttttcttcacgtcaccgattttgcgcaagcagtgggtcagtggttaagcgccgaaactgtacagacgcaaacctatgaattatgcgatggcgtcgccggaggctatgactggcaacgtgtccaacagcttgttgccgatgtccgctgtggttccgtgcggatggtcggtattcctctgccgctactcacctgccttgcggatatcagtaccgcattgagccgtctggcgggtaaagaaccgatgctgactcgttcgaaaatccgtgaattaactcatgccgactggtcggcaagtaataaccgtatttctgaagatattaattggtttcccgggattagcctggaacacgcattacgcaacgggctattttgattgtcttgtttaaaggtgtgttaacgtttctatggtaaatcgtgaaatagtaatggattacatcctttcctgtttacaggatttggtcgaaaacggtgtggaaattaagcccgacagcgatctcgtcaacgatcttggcctggagtcgatcaaagtgatggatctcttaatgatgctggaagacagattcgatatttccattcctattaatattctgctggatgtcaaaacccctgcgcaattaatggaaactctacttccatggctggagattaaataatggggctatacgataaatatgcgcgccttgctggcgagcgcctgcaatttagtgacaacgggttaacaccatttggcacctgtattgatgaagtgtattccgccaccgaaggccggatcggaaataaaaaagtgattctggccgggaccaataattatctcggtttaacctttaatcatgatgctatccgcgaaggtcaggcagcgttagcggcccaaggcactggcaccaccggttctcgtatggcaaacggcagttatgcaccgcatctgacgttagagaaagagattgccgagtttttcaatcgccctaccgctatcgttttttcaaccggttataccgctaatttaggtgtcatcagcgcacttgccgaccataacgccgtggtgttactggatgccgacagccacgccagtatttatgacgcctgttctctcggcggcgcggagattattcgtttccgccataatgacgtcaacgatctggaacggcgcatggtccgcctcggtgaacgggcgaaagaggcgattattatcgttgaaggcatctacagtatgctcggtgacgttgcgccgctggcagaaattgttgatatcaaacgtcgtctcggcggatatttaattgtcgatgaagcacattcgtttggcgtgttaggcgcaacggggcgcggactggttgaagccgttggcgttgaagacgacgtggatattatcgtcggcaccttcagtaaaagtctggcctcgattggcggttttgctgtcggttcggaagcgatggaagtgctgcgctacggcagccgcccgtatatttttaccgcctctccttctccgtcctgcattgcgaccgtgcgctcgtcgttaagaaccattgcctcacaaccagagctgcggcaaaagctgatggataacgccaaccatctgtatgatggtctgcaaaaactgggttacaagttaagttcacatattagcccggtagtgccagtaataatcggttcgaaagaggaaggtttacgcatctggcgcgagcttatttcgctgggcgtttatgtgaatcttatcctgccacctgccgcgcctgctggcatcacgctgctgcgctgtagcgtaaacgctgcccacagtcgtgagcaaatcgatgccatcattcaggcatttgctactcagaagcagtaatgtgaacccgccgtggtgttgcgccacggcgggtttaatgttgtctgtcatgccaatacaccaggctcaacgccaccagcacaaacgctaccggtaaaccgagcgcggtaacaggtgcgctcaacgcaaatagcaatcccagattgaccatgatttgatagctgatccaggtgagtaaaccaacgatgacgcctacagcgagacggctacccatccctggcgagcgcggggcactaaaggtaaacggcacagccagcaaaatcatcgccagagtcaagatgggttgccccagtttttcccacagtgcaaggcggtattcgctgctgggttgcccggtttcctgcaaataatggatgtaatgattaagctgacggacagaaaaagtattccccggcatcgataactcttcaagattcatactggtgaaggtcgattgccaggcaagataatcagatgtttcctgcgtttctttgccattcagccattttttatgattcacaccatgcaggatccacgttttgtcatcttcaatggtggcactgcgcgcataaatgtaggattcgagcgagagatcatcgcggtaatgaaaaatctccacgcccaccggctggccctgctcgttcagcgatttcaccgtcacaaattcattaccgcgcctggcccaaagcatattgccggtaatgtcatcgtcctcccccaacgcggtggcggtcgatttgatttgcagcgcctgttgctgcaatggcgacgccccccactcatctatcgcgcctaacgaaacagtccacagtatcccggcaaccagcgccaccagtgcaatacggaagatagaaaaccccgtgctgcgaatggcggtaagctcactgtttttcgatagctgcccgagaccgacaatacctcccaataaggcgataaacggcgaaagttcgaccagtgtgcgcggtaaggtcatcagcaccaccagcactgcctgagtccagcgataaccgcccggactgacatcatccagttcgttaatcaggttgaaggtggtaaaaagcggcagcaatagccctgcggcggcggcaaaaccgagaaagaggtgacggattaaatagcgactgaaaacattcatcggggaaatttctgcagcaaggagaagtcgcttgcgaccagcatcaacaggcccattagcatgagtccgggcactaaccacaaaccaggaatgaggggaatcgcgccgttagccaccagcgtacggcagacgtcgccgccataaaaaatggcaacaaacagcaacgtcagtggcagtagcgttgaaaatcgcccctgccgcggttttacccgacttaatgaaatggccagcagcgccatcaacaatgctgtcaggccacggctttgtcgccattgcagttcggcatgatcggctggaaagacggagcgtgccagctccgtgaccgattttgctttgcgtttgacgttagggctttgatccagcggattgagatgcaattgcagattacggtagatctgttcgttgtcgtcacgcccctgatgatcgagaagataggcggtaccgttatgcaacataacggtcggtttctcgggtgatgggtcaaccacatcaaccgaacgggcgcggaaaatgcgggttcgattggcagtagaagtataaatcagcgcgtcagtcaggcgattattatcctgatcaaccgtctgcgaaaggatcattcgtccgttatcgttagtgttaaatttctttgcccgcaactgacgaacatccagctccgactgcgattgttgctccagttgataaatctgcgcataagcccagggacgaccatacatcgacagaagggtgacaaaaatacttaacggtatcgccagataaagaacggctttgtacaaacgtcccggactgccccccgccgcggagatagcggtaatttccgagtcggtatacatttgccctagcgtcacgccaactgaagcatatagtccaacaggtaacagcatctccagtgcaatcagcactttgtagaaaacgatatccagcacaacatcaagagctaatgtcccatttgccgcttcggtcagataacgctgtgcggagtagctggcgaaaataaagatcagaaaaccgacgataatcagcaccagacggcgcgtaccacgcatgatgtagtgttcaaccagcttcatctcgctaacgccctcaatcctttgaattttttattcattgatcagtttctgcgccagcgcaatgacatgatctacctcttccggtgtcaggctgccgtcctttgcccactgaattcgcccggctttattcaataccagaatggttgaactctgctccggcaattgccaggcaacgcgtcccagaccattgccgtcaataacgaattgcgcccacggatagcggcgtttatttttttcgattttgccaacgacaaaatagccagtaccaaagatggcatcatcggtgttcacaatagtggtgggctgaaaacgatcctgcgaaaagtttgccgcttcaaccgctttaattaacagtgagttctttttcttcgcagacttacgtccggcgatatactgaataatgcggacttttcccgtcaattgtgtgctgttccacttttggtagtgaatttcgtcgtcgctattcagaagcagctcgccgccttcctggatataaacaggagtaaccgttttgccagtgacgaaattgtgtgccgccgcgcctggcgctaagagtgcgatgatcagagcgacaatccaacgagatggcattattgctccggatatagtgggaaacgcgaaataagcagttctaaacgctggcgaatatcgctatccagcgccaccggtgcatcatatgaccgacggttatccatatcatccgccaccatgtcgtcgtgcttatcccccatcagaccattaatggcggcgagaaaacgggaaatcagtaacgcctctttattttcaggatcaagcgatcttaaggtgtcgtaataagaaacctgctggctgatgatttttcgcacatcatgaaattccctgccagttagttgcggtttagcaataatctctttcaggatgtacatttgcttctggcggtaggcgataaaaccgttcacggtttctaactggctatggcgcaatgaatagttcaccagccaccagacaggggagctcaaataaacacgtaacaggttaccgtaaaacgacacaatatttttcttaccgttacgaaagccatcctgaaaatgcccaagaaaaacggtcgttttgccgaataaaaatccggcctgatgcttctttaaatacagccgttgcgcaaaacgcagatgcttgtagcgcgctcgcatgtatttaaactgtttgcgctcgtctgtcgtcagctcatcgcctttcgcctgtttgcggattaaacgcagtaactcctgacgattaacaccatccagccagaatttcaggcataacgcgtaattatcatggatgatttcggtggtacaacttagtgcgatagtcggcggcaaactgacctgtgcatcaacaacatcatcttcttcaatcgcaacaaatagacgctcgctcgcctcaagcgggaaatattttctcatcatcaggatttctctccggttgagttataaagcaaggaatggcgctgaaaaaatgcctttaaggtcggaattagcgagagcaccacatccagacattgcccaccgaagtaagcaaatgcagcccccagcacgccaaacagatgacagaacatgaacagcaatacgatgtagccgattgaggcgatggtttgcgccacgagaaaagcgcgctgttttcccgccatcaatagcaatgactcctgtgggaagcccagcatcgaaatcacaattgcgcccagcatcacctgaatcaggtcatacgcttcgagatacttaacgccaaacaccagcgaaatgagcggcttgccgacgatcaacaccgcgagcgccaccagaataccgattccgcccgccagtaaaccggacttcacgcctaacaaccacggtctgatggtgcgtggatctaaacgcatcacctctggataaaaacttttgcccagtaaacccgctggcgttccggcggcatcgaagaatgtcatggcgattttaaataacccggcagcagcgggtcctaacacgatccccaccaacactgtgctgcacgagttacgcgccgaccagatggagtgggcaatgttggttgaccagacaaaactccacgcgcctttaatgtgtcgggcagactcaaacagattcaatttgaaggcgttatggatatttctgcggcgtaattcgcgcgcggcaaaccaccagtacatggtgccgccaaccagattcgacacgtaccaggcaataacaaaacccgcaaaaccaaagtcaaaataccaggttacgacgctccccgctgcgcgcagaaaaggtttcgtcgcttgctgtacagcaattagatcgaagcgatctaccgcacgcagaatgccggtcggcgtggaggaagccattgaaggaatgagcgtgcaatacagcgctgccagccaaaagctttggtcatccagacctaatgaatgggaaagaaaagggagtaaggcaatgccgccgacaatcgccaccgcgccgctgacgatatccagcgagaaggaaaatgagacgacattgcggaattgctgcggattattgttggttaatgctggtgttccgtactgaaccaccagctgccatgtctgaaacttaataaaatcgctgatcgatttggcgtacgattgcacaattaccagtacgccaaacatggcgggcgtcatccctttaccggcacacgagagcgccaacagccccagcaaagcgctcacaacattactggagcctaaccaggcgctattgcgaataatggtgcgaaacgcgccatctgcaaaccaatgtttgatgttaaaacccgccaattcagcctgaccttatcgttgatagtaaaaagtatcccgccagccttaagttaaacttcggcggtcagaaacgatggcaaccagagaaaccgccttctgtgcctgttccagcacctcgctgtaaggcgctctggaatcaatctcaagaatttttgtgccgttatagccaatcgtcgacataacaccgattttgtcctgcagctcggcatagtcatggtcaggcttgcgggagatggcagtatcaatatcaatccccaagcgaatgattaattcaggacggtattgcgccattttttggtataaacgccgttcacgctgcgccagaaacctgctgattttcccggtcgcacgttcgacgccaatccccggtccgtcataataaaagcccgaaatttcagcctgcgggaagcgatcgctgaccaccagaacgccactttgcgccagtcgctgaaccttgcgcagattcgccattcttcgcagcgagaagcagtacataatcaccgccgcccatagcgccggagatttggttttcatgctttgggttttcgaggatttggccgccagtcgccgttcgagccagacaccaaccaacggcaatcgtttgattttgtcgccgtcttcgccggagagcagccccagatagcgccgctcggtttgccagtgttgttgcagcgatttcaccaggtcatttgtcagtgtggatttaccggtgccatcacacccgaccaccgcaatcagccccggaatgtagttgggctgcggcgcggttgtactcttaacagtttgtgtttgtagtgcatccattcgtttaatcatcccctatccattttggtgatcaggaaagcgcggcgtgaattgcgcgtagtgacgcttgcagaatttcatcggctggttgccgaccatccagttcaaggatcctggcgccattgaatgtcagttgcggcgtaacggcgattttttcctgtaacgctgccagttggtggtcaggtttacgcgcaaacgcggtttgttcatcaatgccaagacgaatcaacaatacaggcaaataagaagccatccattggtacagcttcagctcacgctgccttaacatttttatccaaccgttaccgcccgtggtttttgccaattgcgggccatcaaagcgaaaccccggcacttcaacctgcgggtagcggtcggtgatgagcagatagccttgctggtttttacacaacattttgcgaaacttgtacgcccgccagcaggaaagcagatagataaccagcgcagtaatattgccaggcggtgttgagggcttttcgtgcacatgtgccgctttacttcgcaaataacgcccaaaaggtgcgccaataacaggtagctgtgaaatccattcgccaattcgcccggacgattgcccgagataaatgtgttctgttggcattcttgatgccagttcatttaccaggcttgccgtgagggtcgatttacctgaaccatcacatcctacaatggcaataacacgcactggcgtggaattaattattgacatattacgttgattcacgaaaaacccggcagcaaataatgtattgaatattacgtggtccgtgctcagaatatccgttcaaccttattgtgacaatggttaattgtgacattgacctgaattacgctttcatcaaaaacatattaaccaaataaatattttggatggatatttaaatttaaggatatattcatgcagtcaataatacctccattaattgccgttattggtagcgatggttcaggcaagtcaacggtgtgtgaacatcttattaccgttgtcgaaaaatatggtgctgccgaaagggttcatttaggaaaacaggccggaaatgttggtcgtgcagtgacaaaattaccgttgatgggaaaatccttacataaaacaattgaacgaaatcaggtaaaaacagcaaaaaaattgcctggaccagttccggcgctggtaattacagcgtttgtcgcccgccgcttactgcgctttcgtcatatgcttgcctgtcgtcgtcgcgggttaattgttttaaccgaccgttatccgcaggaccagattcctggcgcttatgatggtacggtgtttccgcctaacgttgaaggtggtcgttttgtctcatggctggcaagtcaggaacgtaaagcatttcactggatggcgagccacaagcccgatctggtcatcaaactcaatgttgaccttgaagttgcctgcgcgcgtaaacccgaccataaacgggaatcgctggcgaggaagattgccataacgccacagttaacctttggtggtgcacaactggttgatatcgacgccaatcagccactggaaaaggtgctggttgatgcagaaaaagcgattacggattttatgaccgcgcgtggttatcactagtgaaaaatggaaatgcccgatcgccaggaccgggcattttcaggaaggttaaatcaactgcaatgctatccagtacaacccaccagaaagaaaaatcgccgccggtaaagtaaacacccacgccatcaggatgctggttaccgttttacgctgtaacccaccgccgtccaccaccatcgttcctgctactgcagacgagagtacgtgtgttgtggagacgggcatcccaatataactggcaaggccgatagacactgccgccgtcatttgtgccgccatgccttgcgcatacgtcatgccgcgcttaccaatcttctcaccgatggtcatcgctacacgacgccagccaatcatggtgccgatgccgagcgccagtgctaccgccatgatgatccataccggtgcgtactcaatggtgcttaacatatcgctgcgcagttttttcagcaggttctggtcttctttactgacgcctggcagtttcgccagcttcgcggaggtatcagagatgcacagcataatgcggcgcagctggctgcgctgactcacgcttaacggctcgtaactttccatattgcctggcagcatcgttttaacgcgcgcaatcgcatcaaaggtatttgccggatgacagtgaaactctgttacttgcgtgccatcagtcgatgtcgcaggcaatggaggttccatcgtaatcaacttctgcggcagttcaggatgctgttgcaggtagtgttcgaagttggtgacggcatcgcgggtacgggtaatttcatagccggacgcattcatattgacgacaaacccggcgggagcaatccccaccagcaccagcatcaccagaccaattcctttctgcccgtcgttcgcgccgtgcgaaaacgccacgcccgcagcggaaacaatgagggcaatacgcgtccagaatggcggcttacgtttgccttttttctttttgcgatcttccggaatgcggtgaatacggtcacgctttttcgtcccactccagaaacggcgtagcagaaaaattagcccccccgcaatcaccagccccacgatgggagagacaatgagtgaagagaaaatcttggtgacttcgcgcaggtttaacgcatccatcaccgacgaaccatttaacagcgcgttggttaaaccaatgccgataatcgcaccaatcaaagtgtgcgaactggaggccggtaaaccaaagaaccacgttcccagattccagataatcgccgccagcagcatggaaaagaccatcgccagaccgtgagttgaccccatattcagcaacaaatcggttggcaacatatggacgatggcataggcaacgctaagcccgccaagcaatacgccaaaaaagttaaaaaatgccgccatgaccacagcaagctgtggttgcatggcacgggtataaataacggttgccaccgcattcgccgtgtcatgaaaaccattgattgcttcatagaacaacacaaatgccagagcaagtaataacaaaagccccgtatatatatcaaggccaacaaataaatttagcatatattagattacgccattttgaatttacgaacggaggcattatcagtgactttcacggcgtgggcaaagtgaaatatcattttttaacgataaaaagcgtgttatttcttgtgtatcagacaataagccttcattcaaaacctttaaaaataatcaaaacacaggtattccacttgttaatatattcatatatgaaatgaataaatattgaaatatataaatattgaatattttgattaatccccgtactgattattcttcataatcagtacggggttgctacaacatgtattactctttcaccacaattaacggttcaatatcactctcttttttgatgaccagtgattcatcaccgcgcaaacacgtcccaccgtagttgccgccaacggtgaaagtacatacctgaatgtatttaccgtccactttcggcaaacaccacagttgctgatagatgtttttctgctcggcaaatttaccgctggttttgtccagcacctcttcatgatggctgacgaggtcgatgttactgccacagcgaccggcgatcggtttaacggcataaccggttttcaccagctcatcattcacggtgaagtcagtatccaacagataacgatggtgcgggaacagagaccagaggatcggcagaatcgctttgttaccggggatcaccgtccatagcggctcaaaaaccaacacttccgggcgtaacagaacgtctatcagacgaacttcattttgtggatgcccggtacggatcggcactgcggcaaattcacggtcgctcacttcgcggatttgatcaaatgccgtttcccacgcccaggttttccatacgcagttaaccagtcgcccttccccatcaatcagttgcccggcagcatcccagcccagttcatccaacccacgcaagatacgcgtttcaaagcccgcctggtgcagcgcctgctccataaactgcgcgtgatagttttcctcgatatctttgtcctgcatgatatggacaaacggacgtgcacgactgtgtttccacgcgccagccagttcgttaatcagtccttccgcaggattgaagccgttgcctttatagccctgctccgcccaacgttcgaggatcaagcccgcttcggtatgacaggaggcagaatcggcgttgtattcgtagactttcaggccacgttcatccatgcagaaatccatacgaccagtgatcatatgatgacggcgacgctgccaggagagacgcaaacgtggccagaggattttcggaatgtcaaacagcgccagcaggttgtcatctttcagcaccttgtcggtggcgtgaagatacatcaggtgcagctcgttggtggctttaatcagctcctgctcggcactctcggtaatggtgtagtaatgatacggatcctgattgatcacctggccgttggcctgtacataggcgttttgcagcggatctttttcatccagccatttaccgtcaaactggcctttgttttccagacgcgccccgctgattttcagcagttcgcctgcaatttccggctgtggcaagctgtattcggtatcttccgtctggatcatccagcccagaatagtggtgtcatcgaaggtgtctttcagggtatagccgccgttttcgaccaccatctccagctcgcgtgtccactgttgcccttgcggcaacggggtatgaatcacgttctgttccgcaatacggactttgttgccatgcaattgggtaatgatggcgacatggccagtgtctttaaattcaccgcctttatcccagataagaagcgcccccgctaccggtgcacgcggcgaaccgttaggaaatgcctgcaatggcaggatgttgtcattgaccacttcacgcaggaagcgcagtgagaaaatctcccatgccatacccacgtcagtgaagactacaccgtagttcagaaagagaaaacggcgagcaaattcaacgcattgccatttgtggcccatatattcatcgtcgatatagctacggaatacggcgtcatcttcgtattcctgcggatcgagagaactgtaatctgaagagtagattgctaccccacctggggcgtagcccaataatgtcccgaacggggcatcctggctggtcgttcctttgctcatcactttacctttaacaatacaacctaagcagttggcgtaattgttgtgctctgattacctgctcagcgacattaaccggacagaggtcagactaatcatacacctcatcgcagcggctggcgcaaagggttaaaaaattcacattctgtacagcaagtgacctgctacactgcttcaacactaccactcagaaggcaactcactatgacagacaatacttatcagcccgcgaaagtctggacgtgggataaatccgctggcggcgcgttcgccagtatcaatcgcccggtttctggtccgacgcatgaaaaaacgctgccggtgggcaaacatccattgcaactttattcgctgggaacgccgaacggtcagaaagtaacgattatgcttgaggagctgctggcactgggcgttactggtgcagagtacgacgcctggctgattcgcattggcgatggcgatcaattctccagcggctttgtcgaagtgaacccgaattcgaagatcccggcattgcgcgatcatacccataatccgccgatccgcgtgtttgagtcaggctcgattctgctttatctggcggagaaatttggctacttcttgccgcaggatctggcaaagcgtactgaaacgatgagctggctgttctggttacagggcgcggcaccgttcctcggcggtggttttggtcacttttaccattacgcgccggtgaaaattgagtacgccatcaaccgctttactatggaagccaagcgccttctcgacgtgctggataagcaactggcgcagcataagtttgttgcgggcgatgagtacaccattgcggatatggcgatttggccatggtttggcaatgtggtgttaggcggcgtatatgacgccgcagagtttcttgatgcgggcagttataagcatgtacaacgctgggcgaaagaagtgggcgaacgtccggcagtgaagcgtgggcgtattgttaaccgcatcaacggaccgctgaacgagcagttgcatgagcgccatgacgccagtgatttcgagacaaatacggaagataagcgtcaggggtaatggttagcgttcgtcgcagcaagccatccagaccaatgtaggccggataaggcgttcacgccgcatccggcaatcaggcacaatgcctgatgcgacgctgccgcgtcttatcaggcctacgaaagcatccggctttaatcatcacgcgctggtaatgtcgtaatccatttggcgcagtgcgtctaatgtggctttggcttcgtcttcatcgataatgctcatggcaaatccgacgtgtaccagtacccactggcccagcagatcggcagggttaccttcacaaatcagggcgatattcacgtcgcgcttgataccacatacttcaacctgcgcaagctggtgaatatcttcaccgacagccagcacctggcctggaacgccaatacacattgttaactccggttattcaacttcaatacttttgacgattagcgaatcgccggtatcgacacgcaaccgctcgccatgacagatcggacactgcgcatcgtgctgatgaatctccaccacctggctgcaatcccaacaccaggcctgggcgggtttatagacgatatgtaaatcgcacccttgcgctaccgttccgtggcagacaatttcaaaactaaaacggacggcgctctcctcaacgcaggagagtgcaccaatttccagccacacggcggtgacgcgcttaacatcgtgctgctccgcctgccgttggataatttcaacggcgctctggcaaagcgacaactcatgcattttcgccactcctgcggccaaatagcagggcacgacgccctgcgtgtggtacatccggattggtgactggcagcgaaaggatcattcgggcgcagtcatccgtcagccgttggccctcttcaatcgacatgctgtgcgaaagcggcgacatcagcgagcaggagaggtattgcgaaacaccgtccagttcaccaacagtaaaggtcatagtgccatacggcagttgcagaccaattttttcactcactttgcgcagcggccagagttgatccgggccggggaagataactgcactcagcatccacggggtgatcacacaccccgtccactgaccttcgaacagcgtaaagtcagaaacatacaccggcattgaaggatgcagaaaagagagatcatgcatcgaacgccgggcaatttcttcaaaagctacctgtacttgcgccttcggggaggtctggaaacctgctatctcttcagtcatgagtcgcctcccgtgggatagcttccacgcctgattcgcgcagcgcagccagaacctgctcaagcgcaggttcaatcatcgattcgaccgtcggcgtcaaaccgatgtgcggctccagtgattccgggatcacgccgaccagggtcagctttttcggaaactcgccagtgaagcgcagggccgacaatacgtcggccaggccaagctgatgcggagagattttgttggtaaacaacgccggaacttcttcatcccgcaggatcatcatcgttcccggcgcgttctttttcgagacaatggcatccgcaataatcagatgatcgcgatttgccatgtcaccaagcagctccattcccgccgtgccgccatcgaggatctcaacataatccggcagaatgtatcgttgctctaacgcttcaacaatccgcacaccgatggcttcatcggtcagcaaaatattgccgacccctaagactaaaatacgcattacagaaccttcactgaaaccacttcgttgccgtcggcatccactacgtgtaccgcacaggccatgcacgggtcgaaggagtgaatggtacgcaccacttccagcggtttattcggatcggcaaccggtgtacccaccagcgactgctcgtaaggaccgacgtcatcattgaagttacgcgggccagagttccaggttgatggaacaactgcctggtagttgctgatgataccgtctttgatcaccatccagtgagagagcataccgcgcggtgcttcgaggaagcctacgcctttgaactcacccgttgccggaatgttcggcttcacaaaggtggtgtgatcgcctttgccgatattggtgatcagtgcactgtattgattttgcaggatatcctgcaattcacagcagtgaacggtacgaccaataatacggcccagcgtggagtgcagctgcgccacttccagcgtgttgccagtcagtttctgataaatcgcaacgatttcattcagtttgttctgggtagactcgcgtcctgccgccagtttcaccagcatgttagccagcggacccacttctaccgttttgccgtagaaagtcggtgatttcacccaggaatatttaccgtcgtcagaccaaccatcataagccggaatggtggtaccttcccacggtgcctgcggcgcttcgtctttataccaggagtgcttcgcgctttcctgaattcctttgatcaggtattcatcggaatgagaagtgatcggacgatacgaggacagatccgcattctcaatgtagccgcccgggaacaggaagctgccatttttactgtcggtcgggaattccggcacgctcaggtagttcaccgcacctttaccgcgcgtcagccattccgggtagaacgcagcgataactgcagtatcaaccttgtaaacctgctcaacaaagtcgctcagcttgtcgatgaaggacttgatgtacatcaggcgctcaaggttcagcacacccagaccgtcgaggttgatcgggttcgcgacaccacctaccgccaggttctgaatatgcggcgttttaccgcccagcagcgccacaacgcggttagcgtcacgctggcactccagcgcctgcaggtagtgcgctaccgcaatcaggttcacttccggcggcagtttcattgccgggtgaccccagtagccattggcgaaaatacccaactgaccgctggcaaccagatctttgatcttgttctgaactttggtgaactcttccgggctgttcagatgccaggtcgaaacgcctttcagcatttcggaggctttggctggatcagcttgcagtgcagaagtgatgtccacccagtccagcgccgaaagctgatagaaatgaacaatatggtcatgcgtggtgtgcgcagccagaatgatgttacggatgtattgcgcgttaaccggaacgtcgatattcagcgcactttctgccgcacgaacggaagacagcgcgtgagtggtagtacatacgccacagatacgttgcacaatcatccatgcatcgcgcggatcgcggtttttcacgatctcttccatgccgcgccacatggtaccggaagcccatgctttcgaaacgacgccattttcgatttcgcaatcgatgcgtaaatgcccttcaatacgggttaccggatcaatagtaattctctggctcatgctttgctcgcctcatgacgattatgatcgttttgttttaaaggaggaagtatcggcagtagacgaatgagtacgatataagcgcaaatctcaatagccacaaaaccaatagaaatcaacagttcttcccaggtcgggaagtaggcgtaaccgccacccgggttgaatgccaccagcgaataggtcagacgccaggttgcacaacctaacagtgcactcagtgctgacaggaacagcatgcgggaatcattacgcaacttcgccacacgcagaaccaccagcgggaagagcatcagcaggacttcaatccagaacatcacggagtagaagtcaccggcaaacgctaacgacagcttgtcgcgatagataagctcgccaaagcgcagcacgatgaaaatcgccagcaacacactgatggtattggtcagcttaacgaacagactcttttcatccggaccgttgccacgcagacccgcctgcaccaacgaaccttcaaagatgacaatcgagaagcccatgatgaacgccgtcagcagcgagaacagcggcaacatttcatagctttgccacagcggatgcaccttgtagcccgccgagatcatcagcgatcccattgaagactggtgcatagttggcagcagcgcaccaagcgcgatgataaagaacatcaccttgttcagacgtttgagtgacagcttccagcccagacgttcaaacaatgccggagcaaactccagtgccatcacaccgatgtagatggtcatacagaccgccgtctcgaacagtaccgagttcacgttgaagtgacccggaatgtagaagtacggcaggttccagtagcgacccacgtcgatagtgatcgacaagccacccagtgaataaccaaacagactcgccaacagcgccggacgcaccagcggatggtattgcccacggttaaagacgtatactgcccacgccagcgcccagccgccacaggcaaagccggtaccgatcagcaggtcaaacgcgatccacacgccccacgggaagccgccgttcaggtcggagacagagcccagaccgaacaccagacgcttcacaatcaggagcatacagatgacgattaacggtccaaaaatcatgaccggtttactgatgattttgccgcccagcggttgtggatcatgactcatgatcgtctcctccgtcgtgatggtcgtttttagtgttgcgacgaaccagcacggttaagcccgccagcacagccagtggtagcatcatgcctttatacagggtgtgttggacatgttcggaacgcgcaccagtagaaagatcgtccagtttcggcaggtcgagattttcataaggcacacccgtcagtaccagaacctgagtaccgccgccctctttctcgccgtacagatgcggataatatttcggcaccgtatgcaggtaagtgtcgccagatttcagcgtctgacgcggatagtggtattcgctgcccggcttcagcgccagacgttttttcgcctccgccatcagctcttcacgcgtaccaaaaatcaccgcgcccgccgggcacacttctacacagccaggcagaccgcctttatcgagacgttccacacctttctggttgcacaactcgcacttatgcagcgcaccaaacgggttgttgtagtcgtacttcggcacgttgtatgggcaggcgaccatgcagtaacggcagccggtgcacacatctttgtcgtaatggacaatgccggttttcggatcttttttcagtgcagagaccgggcacacagagacacagttcggatcgacgcagtgcatacactgtttcttaatgtacgcgtagccattctcctcctggtctttgttgacccctgtgccgctggtccacacctgaatgatgttattggtatacggcgacagtttgtcgttgttcgaccaggtctgttccccttgcgggttacgttcagggaagttgatatcctgacacttggtgacgcaagcctggcagcctacgcacaaggtcgagtcgtacaacatccccagcgatcccggaattggcgggcggttttcagcagccgcatgactgacagacggcagcgcgcccgtcagcaatgccccgcaggaggctgctttaataaaattacgtctgttcacggttattctccccgtgagtcagcgttatctttcttttgctgacgacccagttcacgcaccgccatcacgctgacaccggcaaccagcccaaccacaccgccgagcaaaccaatagcgcctgccgagacgttgccgccttctttagcgttaacgtccggtttctgtgaacgcggagtctggttttcgacgttggcaagctgatggatgcctttatggaagccgataccttcttcgttacagccatagcacgggtgaccaatcgctaccggccacacgccgccaacatcgcagaattgcagcgttgagcagttgccgtaagtttctggccctttacagccgaggtggtacaggcaccagccttcgcggtgaccttcatcaccgaactctttggcaaaacgaccagcatcgaagtgcgggcgacgttcacagtgttcgtgaatcagacgaccataggcgaaagtcggacggtttttgtcatccagtttcggcggtttgccgtaagtgatgatgtgcgcaacggtcgcgaggaagttgtgcgggttcggcgggcagccaggaatattgataacggttttgcccggtagaacttcttgcaggctgactgcgccagttgggttaactccagctgcggcaacaccgccccacgcagagcaggaaccgatagcgataatggctgctgcgccttccgccgctttgcggatgtgatccacaatcggctcaccggcaaccatgcaataaataccgttatcttttaatgggatggaaccatccaccactaacacatactgccctttgtacttctcgagagcgttatgtttgttctcttcgacctgatgaccgaaggcggcggaaagcacttcgtgatactccagagagatagtctccagcacgaggttttctaccgttggatgcgttgcacgaagcagagattccgtacaaccggtgcactcctgcgcgccaatccagataactggcggacgctgcgggttagtaaccgattcggccatctctgcagcggctttgctacttaaccccatggtggcggctaatgctgcacaaagcttcatgaaatcacgacggttaatgccgtgagaatggatgagggtgttatctccagtcatttatagttattccgttgcgaagacctggcatatattttgcctcaatcgcaaaatcaataatgcgatcgatgcgccatttaccacacatttattatggttatcgatatcatgatactgcggcggggcactaaaacgaagggaagaagcattagtgtaattaattaaagcaagataatacgtatgtttgatcaattttctaggcgataaccggccataaaaaagcgcaacgtagaacaggaattattctcacgaaagaaatccattaccatctctttatccagtccataacggcgcgtcagaatacccgcttcccaggcgctaagctggcgatctccggtcttttcgtacatccggtgtgagtagcctaatacaaaaccgcgtttataatcggcacagaattttgtcacattaaccgcactgtcggcatgcgttgcttttaatcccgccattaagcctttaccaaaatggttattcatcgttcacctcattcgctatatattgtcatatatagcgatattttaggcaaagaacgacatttgcgcacgctattttttcatgcttgtttaagacgtaatcctgtaagagataaacccatcaggagagatatttatcgaaccatttcagcgtcctttgccaggcaagatcggcggcagatttgtcataacggggcgtggaatcattatggaatccgtgattaacccccggatatatatacgcctcatagaccttattattggctttcaacgccgcctcgtaagcgggccagccctcgttgattcggctatccagttcagcgtagtggagcagtaaaggcgcttcaatcttcgccacatcggcagtgggtgcctgacgcccataaaacggcaccgcgcaggccagttccggatacgcgactgctgccgcgttcgatacgcccccgccatagcaaaatccgctaatatacactttgcctgtcgcttgcggatagcgttgcataaactcaattgcggcaaagaaatcattcatcagtttggttggatcaacctgctgttgcagttcgcggcctttatcatcgttaccaggatagccacctactgagcttaaaccgtctggcgccagggcgatgtacccttccttcgccactcgccgcgtcacatcttcgatatacggattcagccctcgattctcatgcaccactaccacggctggcgttttaccgctcatttttgcgggcttcaccagataaccccgtacctcgccgtgaccatttggcgagggatacgtgatgtactctgcaacaatttccgggtcggtaaactctacctgagtcgccagcgcataatttggcttgagcaaatcaaacagcgctaatgccgtcatcccgcccaccgcatacttcgccgcaaggttgaggaactcacgtttcgagattttcccgtgagcgtaatagtcgtagtaatccagcaactcttgtgggaaagctttggcagttaaacgcggcatcgttgcactcctcaactggtgtttttttaagcaaagcataagcgcgtgtttttgcccagtttttcgtcactctgtgagccagactacgggatacgcgcaggcgaatcgctaaactagaaacattgtttcgaaattgaacggtggaaaggagaggtcatggtctggttagcgaatcccgaacgttacgggcagatgcagtaccgctattgcggaaaaagtggtttacgcctacccgcgttatcgctcggtttatggcacaatttcggtcacgttaacgcgctggaatcacagcgtgcgatcctgcgtaaagcgtttgatttaggcattacgcactttgatttagccaacaattacgggccgcctccaggaagcgcagaagagaactttggtcgcctgctgcgcgaggattttgccgcttatcgcgatgaactgattatctctaccaaagccggatacgatatgtggcccggcccatatggctctggcggctcacgtaaatacctgctcgccagcctcgaccaaagcctgaagcgtatggggcttgagtatgtcgatatcttttactctcatcgcgtcgatgaaaatacgccgatggaagaaaccgcctctgcgctggctcatgcggtacaaagcggtaaggcgctgtatgtcgggatctcctcttactcgccagagcggacgcaaaaaatggtcgagttgctgcgcgagtggaaaattccgctgttaattcatcaaccttcgtacaatttactgaaccgctgggtggataaaagcggcctgctggataccctgcaaaataacggcgtgggctgcattgcctttactccactggctcagggattgctgaccggaaaatatctcaacggtattccgcaagattcacggatgcatcgtgaagggaataaagttcgtggtctgacgccgaaaatgctcaccgaagccaacctcaacagcctgcgcttattgcatgaaatggcacagcagcgtggacaatcaatggcgcaaatggcgttaagctggttgctgaaagatgagcgagtgacgtcggtattgattggtgccagccgcgcggagcaacttgaggagaacgtgcaggcgctgaataatctgacatttagcaccgaggagctggcgcagattgatcagcatatcgccgatggagagctgaatctgtggcaggcgtcttccgataaatgacctgttaataacgggcgcgagaaccgcgcccgaatcagatcagtgattatgacgagtcagtcggtcaagatagcccatcacaaatgcagagagcacaaacgtcagatggataatgacgtaccacatcagtttgttatcagggacatttttcgcatccataaagacgcgcagtaagtgaatggaagaaattgccacaatcgacgctgctactttgtttttcagcgacgttgcgtccattttccccagccagttcagcttctctttgttctcagagatatcgagttgtgagacgaaattctcgtaaccggaaaacatcaccatcaccagcaaaccgccaaccagcgtcatatccaccagcgacagcaacacgaggatcaaatctgattccgccatcgagaagatattcggcagtacgtgaataatctcctggaagaacttcagcgccagggcaactaacgccagcgaaaggccaaagtacacgggggcaagcagccagcgagaagcatacattgcattttcaagaaaacgttccatacattcctgtcgtgtagttaaaacgggcaacagtatatcgcaattaagtaaacagcacgcaacagcaaatcaacatatacgttaaacctttgtcgcataattctgagggttagggatcttcctggttcccttatcaacgcatcgagagcgtctacccttaaaggacgttgaacctgaagggagaaaaacgatgtctcatttaaaagacccgaccacgcagtattacactggtgaatatcccaaacagaaacaaccgacgccaggcatccaggcgaagatgacaccggtaccggattgcggcgagaaaacctatgttggtagcggtcgcctgaaagatcgtaaagcactggtgacagggggcgattccggaatcggtcgcgctgccgccattgcttacgcgcgtgaaggggctgacgtggcgatcagttatcttcccgtggaagaagaagacgctcaggatgtgaaaaagatcattgaagaatgcggacgcaaagccgttctgctgccaggcgatttaagcgatgagaaattcgcccgttcgctggttcacgaagcacacaaggcgttaggcgggctggatattatggcgctggtagccgggaaacaggttgccattcctgatattgcagacctcaccagcgaacagtttcaaaagacctttgccattaacgttttcgcgttgttctggctaacccaggaagcgatccccctgctaccgaaaggtgcaagtatcatcaccacttcctcaatccaggcataccagccaagcccgcatttactggactatgcggctacgaaggcggcaattctgaactacagccgtggcctggcaaaacaggtcgcggagaaaggtattcgggtgaatattgtcgcgccaggcccgatctggacagcactgcaaatttctggcggacaaacgcaggataagatcccgcagtttggtcagaaaacgccgatgaagcgtgcggggcaaccggcggagctggcccctgtatatgtttacctggcaagtcaggagtcgagctacgtcaccgcagaagtgcacggtgtctgcggcggcgagcatttaggttaaaaaaatgcccggttgtgaaaagcaaccgggcatcatttttatttcgctttcgcagtttcttcgccgaccagacctattttcaggtaacccgcctgatgcagcgtatccattaccttcatcaacgtctcgtaatcgacagttttatccgcacggaagaagatggtggtgtctttcttgccttcggttaacgcattcaacgccgtaatcattgtttcatcggtgaccggatcgttaccaataaacatcgagttgtctgctttcaccgacagataaaccggtttttccgggcgcggctgcggcgtgctggtagaagcaggcaaattcaccttcacatctaccgtcgctaacggtgccgccaccataaagataatcagcaaaaccaacatcacgtcgataaacggcgtcacgttgatatcatgcatttcgccgttatcgtcgaggttttcgttaagatgcatcgccatcggacattatcctgcacgtaatttttgtgcgacacgaaccggatgcgcagcggcgctggcttccagatccaggtcacggctttgcagcaacaatacctgcgctgcaacatcacccagcatcgctttaaagccgccaatctggcgtgcaaatacgttatagataacgaccgcaggaatcgctgccacgaggccgattgccgttgctaacagagcttctgcaatacccggcgcaacgactgccaggttagtggtctgcgtttgcgcgataccaataaagctgttcatgatgccccagaccgtaccaaacagaccaacgaacggcgaaatcgcgccgatggttgccagatagccgttaccacggcccatttgacgacctactgcggcgacccgacgctccagacggaagctggtacgttctttaataccttcgttatcgtcgctgccttctgacagttccagctcattctgcgcttcattgagcaaatgcaggctcaagcttttgctaccaaaatcagcggcgatatcgttggcctggtttaaggaacgcgcttcagccagcagttgctgctcgcgcttaagacgacgcttctgattgaagaactccacgctcttactgaagaagattgcccaggtgactacggaggccaaaataagcccaatcatcacgcacttaacgacaatatcggcgtgctgatacataccccagacggagaggtccgtctgcattaaattattacccactgtgtatctccaggacgcaagtcacaaaatctgtgcataataatatcaaaacgacgtcgaattgatagtcgttctcattactatttgcatactgccgtacctttgctttcttttccttgcgtttacgcagtaaaaaagtaaccagcacgccatttgcgaaaattttctgctttatgccaattcttcaggatgcgcccgcgaatattcatgctagtttagacatccagacgtataaaaacaggaatcccgacatggcggacaaaaagcttgatactcaactggtgaatgcaggacgcagcaaaaaatacacgctcggtgcggtaaatagcgtgattcagcgcgcgtcttcgctggtctttgacagtgtagaagccaaaaaacacgcgacacgtaatcgcgccaatggcgagttgttctatggacggcgtggaacgttaacccatttctccttacaacaagcgatgtgtgaactggaaggtggcgcaggctgtgtgctatttccctgcggggcggcagcggttgctaattccattcttgcttttgtcgaacagggcgatcatgtgttgatgaccaacaccgcctatgaaccgagtcaggatttctgtagcaaaatcctcagcaaactgggcgtaacgacatcgtggtttgatccgctgattggtgccgatatcgttaagcatctgcagccaaacactaaaatcgtgtttctggaatcgccaggttccatcaccatggaagtccacgatgttccggcgattgttgccgccgtacgcagtgtggtcccggatgccatcattatgatcgacaacacctgggcagccggtgtgctgtttaaggcgctggattttggcatcgatgtttctattcaggccgccaccaaatatctggttgggcattcagatgcgatgattggcactgcggtgtgcaatgcccgttgctgggagcagctgcgagagaatgcctatctgatgggccagatggtcgatgccgataccgcctatataaccagccgtggcctgcgcacattaggtgtgcgtttgcgccaacatcatgaaagcagtctgaaagtggctgaatggctggcagaacatccccaagtagcgcgagttaaccaccctgctctgcctggcagtaaaggccacgaattctggaaacgagactttacaggcagcagcgggctattttcctttgtgcttaagaaaaaactcaatgatgaagagctggcgaactatctggataacttcagtttattcagcatggcctactcgtggggcgggtatgaatcgttgatcctggcaaatcaaccagaacatatcgccgccattcgcccacaaggcaagatcgattttagcgggaccttgattcgcctgcatattggtctggaagatgtcgacgatctgattgccgatctggacgccggttttgcgcgaattgtataacattgccacttttggacaattttgcagacattttattgtgaaaagtcttaaattgttgcgtccgggatcaaggcgtcccggacgattcaggagtacaataggcagataaaggcttaaacgctgttccacaggaaagtccatggctgttattcaagatatcatcgctgcgctctggcaacacgactttgccgcgctggcggaccctcatattgttagcgttgtttactttgttatgtttgccacgctgtttttagaaaacggcttgctgcccgcctcatttttgccaggcgacagcttgttgatactggcaggcgcattgattgcccagggggttatggattttctgcctacgattgcgattctgaccgccgcagcaagtctgggctgctggctaagttatattcaggggcgctggttagggaataccaaaacggtgaaaggctggctggcacagcttcctgctaaatatcaccagcgcgccacctgcatgtttgaccgccacggtctgctggcgctgctggctggacgttttcttgcatttgtccgtacgctgctgccaaccatggcgggaatttccggtctgccaaaccgccgcttccagtttttcaactggttaagcggattgctgtgggtcagcgtggtaaccagtttcggctatgccttaagtatgattccgttcgttaaacgacatgaagatcaggtaatgacgttcctgatgatcctgccaattgccttgttaaccgctggcttgttgggcacgctgtttgtggtgattaaaaaaaaatactgtaacgcctgacgattttccccgttcccggttgctgtaccgggaacgtatttaattcccctgcatcgcccgcattcttgccgcatcttcccccggcgtcacaccgaagtaacgtttaaactcacggctaaattgcgatgcgctttcatagccgacgcgcatcgccgccgcgctggccttcatgccgtcgtggatgatcatcatccgcgccttatgcagacggtaattcttcaaatactgcaacggcgaggtgctggtgacagacttaaaattatggtggaacgccgatacgctcatgttggcttctgccgccagttgctcgacgctcaggttttcggtgtatttattctcaatccgtttcagcacgcgactaatcaggctgaagtgagtctggcggctgaccagtgccagtaacgcgccgccgcaaggtccggtcagcacgtagtacagaatttcgcggatgatctgtttgccgagaatacgcgcatccagcggtcgctccatcacgtcgagtaaccgctccgccacgcataaaatctcttctgataacgtggcagagttaatcccgctggctgccatcgacggctggaaatgctcatcttcgccaatttccatcaacagttcctgtaactgcaaaatatcgacattgagacgcaaccctgccagcggcacctctgacgtggcataggtttcgcactcaaacggcaacggcaccgtcagcagcaggtattcattggcatcataacgaaacacgcgttcattgatataaccgattttatgcccggaaaagagaattatgatgccaggctcgtacatcaccggtgtgcgtgcgaaaggcgtctcgccatacaacaaacgcacatcgggcaacagctctgacaaactattttctttatttttcagtttattaactttatccgccagcaagcggcaaatctcttcacgtttcatatcgcgtaatttcttaggaataatgcggcaatttgattgtgcgcaattttgtagcatttctccagcactctggagaaataggcaagacattggcagaaatgagcattgagaggtacggcgctggcgaccacaatgaaaaacatcaggcagaccgatctctgccctcatattgacccagcaaagggagcaagtaatgaacaactttaatctgcacaccccaacccgcattctgtttggtaaaggcgcaatcgctggtttacgcgaacaaattcctcacgatgctcgcgtattgattacctacggcggcggcagcgtgaaaaaaaccggcgttctcgatcaagttctggatgccctgaaaggcatggacgtactggaatttggcggtattgaaccaaacccggcttatgaaacgctgatgaacgccgtgaaactggttcgcgaacagaaagtgacgttcctgctggcggttggcggcggttctgtactggacggcaccaaatttatcgccgcagcggctaactatccggaaaatatcgatccgtggcacattctgcaaacgggcggtaaagagattaaaagcgccatcccgatgggctgtgtgctgacgctgccagcaaccggttcagaatccaacgcaggcgcggtgatctcccgtaaaaccacaggcgacaagcaggcgttccattctgcccatgttcagcccgtatttgccgtgctcgatccggtttatacctacaccctgccgccgcgtcaggtggctaacggcgtagtggacgcctttgtacacaccgtggaacagtatgttaccaaaccggttgatgccaaaattcaggaccgtttcgcagaaggcattttgctgacgctgatcgaagatggtccgaaagccctgaaagagccagaaaactacgatgtgcgcgccaacgtcatgtgggcggcgactcaggcgctgaacggtttgatcggcgctggcgtaccgcaggactgggcaacgcatatgctgggccacgaactgactgcgatgcacggtctggatcacgcgcaaacactggctatcgtcctgcctgcactgtggaatgaaaaacgcgataccaagcgcgctaagctgctgcaatatgctgaacgcgtctggaacatcactgaaggttcagacgatgagcgtattgacgccgcgattgccgcaacccgcaatttctttgagcaattaggcgtgctgacccacctctccgactacggtctggacggcagctccatcccggctttgctgaaaaaactggaagagcacggcatgacccaactgggcgaaaatcatgacattacgctggatgtcagccgccgtatatacgaagccgcccgctaagctttttacgcctcaaactttcgttttcgggcatttcgtccagacttaagttcacaacacctcaccggagcctgctccggtgagttcatataaaggaggaacgtatggctaatccaaccgttattaagctacaggatggcaatgtcatgccccagctgggactgggcgtctggcaagcaagtaatgaggaagtaatcaccgccattcaaaaagcgttagaagtgggttatcgctcgattgataccgccgcggcctacaagaacgaagaaggtgtcggcaaagccctgaaaaatgcctcagtcaacagagaagaactgttcatcaccactaagctgtggaacgacgaccacaagcgcccccgcgaagccctgctcgacagcctgaaaaaactccagcttgattatatcgacctctatttaatgcactggcccgttcccgctatcgaccattatgtcaaagcatggaaaggcatgatcgaattgcaaaaagagggattaatcaaaagcatcggcgtgtgcaacttccagatccatcacctgcaacgcctgattgatgaaactggcgtgacgcctgtgataaaccagatcgaacttcacccgctgatgcaacaacgccagctacatgcctggaacgcgacacacaaaatccagaccgaatcctggagcccattagcgcaaggagggaaaggcgttttcgatcagaaagtcattcgcgatctggcagataaatacggcaaaacccctgcgcagattgttatccgctggcatctggatagcggcctggtggtgatcccaaaatcggtcacaccttcacgcattgtcgaaaactttgatgtctgggatttccgtctcgacaaagacgaacttggcgaaattgcaaaactcgatcagggcaagcgtctcggtcccgatcctgaccagttcggcggctaacgtgcaaattctcccggtggcggtaatgttccgctaccggacttttcagaaatcatttattcccctcgcgtcccgcccgttgctactcttccttgttcaggaatgccaaatataaggacatcatcatgcagagccggaagctcttaaaagaacaactcatctatatccgggataaacgcaacggagaggtgaaaaacagatgaaaataatacttctgtttttagcaggccctggcaagttttaccgtacacgcacagcccccctcacagaccgtagaacaaacagtccggcatatttatcagaactataaatcagatgccactgccccttattttggtgaaaccggagagcgagcgataacttctgcgcgtattcaacaggcgcttaccctgaacgacaatcttacgctgccgggcaatattggctggctggattatgatccggtttgtgattgtcaggattttggcgatctggtgttagaaagcgtagcgataacccaaactgacgccgatcatgccgatgccattgtgcgctttcgtatctttcaagacgataaagaaaagacctcgcagacactgaaaatggtggcggaaaatggtcgttgggtcattgacgatattgtcagcaatcatggcagcgtcttacaagcggttaatagcgagaatgaaaaaacactggccgctatagcttcgttgcaaaaagaacagccggaagcctttgttgccgaactctttgaacatattgctgattatagctggccgtggacgtgggtggtttccgactcttaccgccaggcggtcaatgccttctataaaaccaccttcaagacggccaacaatcccgatgaagatatgccaatagaacggcaatttatttacgacaatccgatctgttttggcgaagagtcgttattttcacgcgttgatgaaattcgagtcctggagaaaaccaccgattccgcccgcattcatgttcgctttacgctgaccaatggcaacaacgaagagcaagaactgattttacagcggcgcgaaggtaagtgggaaatcgctgattttatccgcccgaacagcggcagcctacttaagcagattgaggcaaaaaccgccgccagattaaaacaatgagctgaattaaataacaattagccggaacaataaataaaagggaacactatatgaaaacgattttcaccgtgggagctgttgttctggcaacctgcttgctcagtggctgcgtcaatgagcaaaagatcaatcagctggcgagcaatgtgcaaacattaaatgccaaaatcgcccggcttgagcaggatatgaaagcattacgcccacaaatctatgctgccaaatccgaagctaacagagccaatacgcgtcttgatgcacaggactatttcgactgcctgcgctgcttgcgtatgtacgcagaatgataaaaaaatccccggcagcattctgttaccggggatattttttaacgtccaaccgccgctttagggcgtttcttcgcaccagcattctgcaggcgagattgcgtagacgacgctttttttgccgtagcaggcgtctgacgctgggtcgccatcggcgtatgtttagtcaacgccggacgggtattgcggttctgacggcgagcttcacgcatctcttcaatggttggcgcaggcactaagcaatcgcgacggctgccaatcagatgctttttgcccatcgcttccagcgcctggcggattaacggccagtttgccggatcgtggtaacgcaacaacgctttatgcaggcgacgctgcttgtcgcccttcggtacgaagacgtcttcactcttataaccaatcttcgccagcgggtttttgccggtgtaatacatggtggtcgagttagccagcggcgacggatagaagttctgcacctggtcgaggcggaagcgatgctttttcagccatagcgccagattcaccatatcttcatcacgcgtacccgggtgcgcggagatgaaatacgggatcagatactgttctttacctgcctgtttcgagtaagtatcgaacagctctttaaagcggtcatagctgcccatgcccggcttcatcatcttcgataacggcccttcttcggtatgttccggggcaatcttcagataaccgccaacgtgatgggtcgccagctctttgatatagcgcggatcttctacggcgatgtcataacgcacaccagaggcaatcaggatctttttaatgcctttcagatcgcgcgcacggcgatagaggttgatcgtcggttcatggttagtgtccatgtgcggacaaatatccggataaacgcacgacaaacgacggcaggtttgctcagcgcgtggcgatttgcagcgcaacatatacatgttggcagtaggcccaccgagatcggaaatcacgcccgtaaaacctggaacagtgtcgcggatcgcttcgatctcattaataatcgaatcttcggaacggctctgaataatgcgcccttcgtgctcggtaatagaacagaaagagcagccgccaaagcagccacgcataatgttgaccgagaaacgaatcatttcgtaagccggaattcgggcattaccgtaagccggatgcggcacgcgcttgtacggcagcgcaaagacgctatccatctcttcggtagaaagcggaatagcaggcgggttgatccatacatagcggtcgccatgtttttgcatcaatgcgcgggcgcagcctgggttagtttcgtggtgcagaatgcgcgaagcatgggcgtacagcactttatcgcccttcactttctcgaaagaaggcagcaacacgtaggttttttcccacggtttcgggcgtggtggctgcacggttacagctttggcttcctgctttttcggagctaccggtttgttatccgcgcacggcaaatcttcgccatacggatgcgggattgggtcgattttccctggggtatcaagacgggtggaatccacaccgctccagccaggcaacgcctcttttacgataatcgcggtattacgcacatcgcggatttcactaatcggctcgcccatcgccagacggtgcgccacttccaccagcggacgctcgccgttaccgaacatcagcatgtcagctttggaatccaccaacaccgaacggcgcacggtatccgaccagtaatcataatgcgcggtacggcgcaggctggcctcaataccgccgaggatcaccggcacatctttccacgcctctttacaacgctgggtataaaccagtgtggcgcgatccggacgcttacccgcgacgttatccggtgtgtaggcatcgtcatgacgtaaacggcgatcggcggtatagcggttgatcatcgagtccatgttgccagcagtaacaccgaaaaacagattcggtttacccagacgcataaagtcgtctttactgctccagtctggctgggcgatgatcccgacgcgaaagccctgcgcttccagcatacgaccgcaaatcgccatcccgaagcttgggtgatcgacatacgcgtcgccagtaaccaaaatgatgtcgcagctatcccagcctagttgatccatctcttcacgtgacatcggcaaaaacggtgccggtccaaaacaggcggcccagtactgcggccaggagaacaggtcgcgatccggttggatcagggagatagagctcattttgcttccagaaatggtaaaaaaataatcaaaggccggggattatacgctgtatcacgcgcggaaatgaagtgatgttgatgaacggtggcgaaataccctggtgaggtttttcactgcccgacttgggcaagcacatttaaggctggcggtatcgtggcaactgccgctactatttatgccgctcagcaacgttcaaatcatattgcacgtcgatcggctatccgaggacacccacagtaaggcaaggtatggaacaggttattacaaagcgccgctattacgatattggtctacagattgaagagctgctgtattcaggcgtatttaaggccggagaacgcttaccttcagaacgtgaactgagcgagcggtttaataccagccgaactaccattcgtgaagccatcattatgctggaactgaaaggcgtattgaatgtgaagcaagggtcagggattttctttgtcgactccaccgataagctcaaccagaaatcattaatgccctattcagaaattggcccgtttgaactgttacaggcacgtcaggtaattgagagcaatattaccggttttgctgccagccagatcagctttaacgagttacaagagttgaagaaaatcattggattacaggaaaaagccatcgctgcggaaagtgataaatttgaagacctggatcaccgatttcatagcattattgccgaagcgacgcaaaatcgggtactcatcaaacaagctgctgaattatggcgggcagttcgtacagaaaacccccgctggaagaaacttaactacaagtacctgcatgaaaagcatttgcgtctgcaatggctggaagatcaccgggctattttcctggctctgcaacagaaagattcagagctcgccagggaagcgtcctggagacatctggaaaacagcaaaaatgaactgatcaaaatcttcaaacaagacgcttccatcagcgattttgatgactttttcttcgctcgttaaccttcattagtccagagctggcggaaaaaataacgccggctctgccttccgccctccactggtacacgctctctttttaattggtctaataaatcgactatcatcagatatcttagattagcggcaattatcctaaaaactgacctctaaaaaactttcctttcattttattcatataactcattgatacagatataaataacgccttgttgttctgtttcgtacttttacctttctctgcaagcgtgatgcatctctctgtttttggtctaatgaattatgtaaattggtatacacacaagccaccaggagtaagagcataatgtcagggaacgaaagtatcgatgccgcccactatgatcaggtaaccacctggcctcggggcgggttacaggcagatattgtccatattggttttggcgcttttcatcgcggacaccaggctgtctacacggatctcactaatcagctttctgacacccactgggggatctttgagatcaacctgtttggtgatgctcaactgatcgaaaacttaaatgcgcaaaatgggctgttttcggttgtggaaacatctgcatcgcaatctacctcacgccttgtgcgttcggtaactggcggtattcatacccccgtggatggcattgccgcagcaatccagaaattgactgaacctcaggtaaaaatcgtttcattaaccatcaccgagaaaggctattgtctcgattcgcaaacgcgatcgcttgatctcaccaatggattaatcaaacacgatctacaaaacccggatgcgcctcagtcggctattggcttgatcgtctgtgctttgcaacaacgtaaagcggcagggctcgccgcttttagcgtgctctcctgcgacaacttgccagacaatgggcatctgacgcgaaatgccgttctcggttttgcccgacaactggaccagcccctggctcagtggatcgaagaaaatgtctcatttccaggcacgatggtcgatcgcattgttccggcaatgaccgaatcgcaattcgccttactggaaactaaaaccggttatgccgatccctgcgggatcgtctgcgaatcatttcgtcagtgggtgattgaagataattttgtgcatgggcgaccacaatgggataaagcaggcgcgatgtttgtcagcaatgttcagccttatgaagagatgaagttacgcatgttaaacggtggccattcatttctggcctataacggctcactggctggctatgaatttatctggcaatgcatggaagacgctgattttcgttccattacccgccaactgatgattaatgaacaagcccgaacacttaatccagacttaaatatcgacgcccaggaatacgccgacctgttaattgaacgctttagcaaccgtaatgttgcacaccgtaccgggcaaatcgctatggacggttcacaaaagcttccccagcgtgcgctgacgccctggctgaaattgcatcagcaaaaacaaaacaatgctgttctgtcactgctcgttgctggttggttgcattatgtcattgaagctgttgagaaaagccagtctgtcgcggatccaatgaatgaacaatttcaggcgctaataaaggaacaacaagacgcatggcaacaggcgctcgcattactgcaccttagcgccatatttggtgatttaagcaaccatcagccatttataaatgaaataaaaatcgcctttgcaaatataaaaaacaaaggcatcaaggccaccatcagccaattattatcggatgagcagaaatgaaaacattaatttgtcagcagcctggcgttatggaatatgtggaaaaggatattcccacaccagcagataatgaagtgctgttaaaaataaaagctgtgggtatttgtggtactgatattcacgcttttgccggcagacagcctttttttagctacccacgtgtattaggtcatgaaatatgcgccgaagcggtttcgcgaggcagccagtgccaaacagcacaatcaggccagcgctattccgtcatcccatgcattccgtgtggcgagtgcgcagcctgtcgggaagagaaaacgaactgctgcgaacgtgtttcgctgtatggcgtgcatcaggatgggggttttagtgagtaccttgcggtacgtgaagacaaccttgtgcctctccctgacgaggtcagcgacagtgccggagcattggttgaatgtttcgccattggtgcacatgccgttcgtcgggcagagatcaaggctgaacaaaacgtactggtgattggcgctgggccaatcggtctggctaccgcagccatcgcccgggctaaaggggcacatgttgttgttgctgatattgactgtcaacgtcgccagcacgttgtggatcatctggcgattaatgccttcaatcccacacaggaagattttattgccgcgcttcgtgaggcctttggaggcgaactggcttgcgtagtactggatgcgacgggaaataaagcttcaatgagtcatgatgtcaatcttattcgtcatggcggcaaaattgttttcatcggtttgtacattggtgaacttgttattgacgatccgaccttccataaaaaagagacaacgttactcagcagccgcaatgccacacgggaagattttgcgttggtgattgaactgatgcgcagcaataaaattcacgaaaatttaatgaaaaaccaggcgttcaatttctttagtgttggcgaagattaccagcgtaacgttgtagaaaataaaaatatggtcaagggtgtgatcactttttaagggaacaaatatgacaactgtttatgtcagtgaagaaaatttaaaatcactggtgcaccacaaattacataccgccgggctggataccgacaccacacaacaggtgacagatgttttagtacatgccgatattaccggtgtgcattcacatggtgttatgcgtgtcgaacattattgcacccgccttgctgccggagggttaaataaagccccgcagtttagcattgagcaaatttcaccgtcagtggccattctcgactctgacgacggaatggggcattccgcattaattagcgccactgagcacgctattaaactggcccagcaagagggtctcggttttgttagcgttaaaaacacgtctcactgtggtgcgttatcttattttgcagagatgatcaccaacaaagggttggttgctatcgtaatgacgcaaaccgatacctgtgtggctccccatggcggcgccgagcgctttttgggaactaaccccatcgcctttggtttcccggtggaaaacagccatccgatgattgttgatatggcgaccagtgccacggctttcggcaaaatacttcatgcaaaggaaaccggaaaacatattggtgaagggctggcgatagataaaaacggttatggcaccactgatccgtataagattgaaaacctgctacctttcggccaacacaaaggttcaggcattgcactggctattgatgcactgactggcgtgctgatgaatgcgaattttggcaaccatattgttcgcatgtatggtgattatgacaagatgcgtaagctggcaagtttggttattgccatcgatccgaaaaagctcggcaatcctgtttttgcaaaaactatggcgaaaatggtcacggagctgcatgccgttaaaccggctcctggtgtcgaaaaagtgttagcgccgaacgatccgcaaatgcactacaaagaaaaatgccaacaggaaggtattccggttccggcaggaatattccattatctggcagagaattaatcactattttttattataacgatagaaaagcgctgtatttatcgtttctgttatattaaccaggagcaggatatgaaagcacttcgtcctctgacggcatcgcttatgctgttaaccagttgtttattaatatctaataccacactggcaaaaacaacattaaaactgagtcataatcaggataaaagccatgctgtccataaagcattaagctatttagcggataaaaccaaagagtattctaatggtgaattagttattcgcatttacccaaatgcgacattaggtaatgagcgtgaatcactggaattaatgaactccggtgcattacagatggttaaggttaatgctgcatcactagaatcatttgctccggattacagccttttcagtctgccgttcttattccgcgaccgtgatcactattatcgtgttctgcaaagtgatttaggtaaaaaaatacttaattcatcagaaagcaaaggttttgttggtattacgtactatgacggcggtgcgagaagtttttattccaataaaccgattacaaaacctgaagatttagcgggaatgaaaatcagggttcaacaaagccccagcgccattgcaatgatgaaagcactcggtggtgtcgctaccccgatggcgcaaggcgaactctacaccgcacttcagcaaggagtggttgatggcggagagaacaataccgttgtctatgccgatatgcgtcacgccgaagtcgcaaaagtctattcacgtgatgaacacaccatggtacctgatgtgttaattatcagcaccgacgtgttaaataaacttggtgataaagagcgcacggcattattaaaagcagccgatgagtcaatgatgcagatgaaggacgtcatctggcctgcggctgaaaaagaagcctacgacaaaatgaaagggatgaacgcaacagttgttgatgttgataaatccgctttcaaagaacgcgtcaaaccgttatacgatgaattcaaggcgaaagatgcacaatcagccaaaaaccttgagctagtagaaagtatgtaaccctaatgggcaggtaattcctgccttttcatggaagacttatgcgaacactcactcatattcttaataagatccttgccggatgttgctgcattattctcgccattatggtgttctgcgtaacctggcaagttattgcacgttttatttttaacgctcccagcactgtgcttgatgagttcacccagattttatttatgtggatgattttacttggcggtgtatatactgcggggttaaaaaaacatctggccattgatttgttggctcaaaaacttccggctgcatctgttctgacgcttgacagttttatccaaattattattacggtctttgcggttattttcatgatctatggcgggaatattgttgttgaaaaagcacaacatgttggacaaatctctccagtattaaaatggccaatggataaagtatattgggttatgcctgtcagtgggcttattctggtctggtattcagtaatgaatattattgacaactatcgtaaacggaattttcattaacgagggaaatatggactttgaatatatctaccccgtcttaattttatttggcagttttgccgtcatgctggcaataggtgtgccaattacttttgcgattggtctttcttcgctgttatctattattactgccttaccacccgatgccgccatttctgtgatttcgcaaaagatgactgtggggctggatggctttacgctattagccattcccttcttcgtgttagccggaaacattatgaataccggtggtatagccagacgactggttaacctggcgcaagcattagttgggcgtcttcctggctcactggctcattgtaatatcctcgcgaatacactgtttggtgcgatttcaggttcagccgttgcgtcagccgcagcggtaggtgggattatgtcaccactgcaagaaaaagagggatatgatccggcgttttcagcagcggttaatattgcctctgcacccattggcctgatgatcccaccgagcaatgtgttgattgtttattccctcgccagtggcgggacttctgtcgctgcgttgttcttagctggatatctgccgggcatcctcaccgctgttgccttaatgtttgtagctgcactttatgcccgacgtaaccattatccggtggccgaacgcatcaattttcgtcagtttttacaagtattccgcgaatcaattcctagcctgatgcttatttttatcattattggcggtattatcgccggggtatttacgcctacagaagcatcggcaattgcggtaatttatagtttagccctggcgatgatttaccgggaaatcactcttaagaagctcaatgatattctgttagattcggtagtaaccagttcaattgttctgttactggtaggctgctcgatggggatgtcatgggccatgacgaatgctgatgttcctgagttgatcaacgaactgattacccgcgtttcggataacaaatgggtcattctgtttattatcaatatcattctgttgatcgtcggtacctttatggatatcacgccggcgatcctgatatttacacctattttcctgccgatcgcccagcatctggggattgatccgattcacttcggcataattatggttttcaacttaaccattggcctttgcacaccacctgtcggcaccattctgtttgtggggtgcagcattggtaaggtcagtatcgacagggcaataaaaccattactgccgatgtttctggcattgtttgtagtaatggcaattatttgttatttcccgcagcttagtctgatgctgccaggattattttcgacctgatacacaatgaagactgcatactgagtaattttcaatgccccaccactctgtggggcattgaattggtccattacggtaccggattgaccaacagttgcccaatcgagccacggtccgccatttccagcgtctgactgttgaagtagaacgggaagtgcgcccaggaaggctgaccgaaataaacaagcagctccacttgtccgtcaacccaaacggtatctttccagcctctgtcttccgggaacggcatcgcgccattcacgttacggatctggaacatcacgccttcaatatggaacgcttgcggctcgtccgcgcgcaccgtccagcgttcccacgttccttgctgcgcggtgacatcaatacggttgacgtcccacagttgtccattaatacccgggtcatcacccagactaatatcgcgactgcgaatcggcgaaccggccatgatttcagttggcagcaagcgcatcggaagactgtcagtgaccagcggcagaaggccggttgggcgcagcgttagcaccagcgtagaaaccagaatgctggatggctcaaagaagccacgaatacgatcaacaatgctcgccgcttcgccacaggtaatcgacacttcatcaccgttgctcatatccaccagaatctcacgacgctcgcccggtgccagcgaaagttgcttcaccgatacaggagcgggcaggaatccctgatcgccagaaatcacatgtaacgggcgaccatcgctcatctgtagttgatagcgacgagagttcgacgcgttcaacagacgcaagcgcacccagccacgcgagacttcaacgtacgggctttgtacaccgttaaccagcagcgtatcaccaacaaagccgccgcttcccggttcgttgtattctggcgtaccaaagttatccagccgtttatcctgaataatgacaggaaaatcatccacaccataatggttggggataggcagcgatttactgacttcatcttccaccagccacattccggcaaggccgttatagacctgctgagccgtgcggttgggagtattggcgtgataccacagagtagctgcgttctggcgaatgggcagtacgggtgcccagtcagcgtttggcgacatcatccgtgccggaccgcccatcagcgggccaggtacctgtagcccggccaccgtcattgagacattttctgtcaggcggttgctgtaaataagcttaacatcgtcgcccttccagacgcggatagtcggccccaggtaacgaccattgattccccaaaccgacgcgcgtgtccctggcgtaaatgaccagtgcgcacgttgtacagtcataaacagcggttgcccacggcgagattcaagcagcggcggaacgggtagcggttgctgttgcccggctgcgctggccttcaggggaacagcgcctgcacaaagtgcaatccccgatgcctgaatgaactgacgccgactgagtgacatatttgctccatgtaaaactggctaaagtaataccgtgcaggaaagtgttccccgcaaaaatacagattgccgacttaaacttttccggcggcttcgcgttctgcgacttctttatcgagctcggcgattttttgttccattatcgaacgacaatgggcagccaactcgcgaacctgatctttgccatactgactgacgtcaattggcggcagcatttcgacaatcaccagaccgttgtgtagccgattaagattaatcttattcgaagttgtagagacgcacacgggtataatcgggacgcccgccgcaattgccgcgtgaaatgccccggtcttgaacggcagcaggccgcgaccacggctgcgggttccttccgggaacatccagatggaaatacggcgttttttgaagtgattcactacttccgcaatagtgccgtgagctttagtgcgattgtttctgtcgatcaataagttgccggttaaccagtacaactgcccgaagaaggggatccacagcaagctctttttacctaccgtcactgtcggcggctgcacaatgttcgatgccgtcaccatgtcataattgttctggtggttagcaatatagatagcattgccgtagctttcagcgtctgcaggtttgcggcactccactttcaggccgaaaagcggcgcaagacggccaaacatatgcccaaaggtggccacatgtttcgggttacgcgggctgaaaaggcagtaaatggagccgaatacacagactaagatgctgtaaatcacggtaataataagacgaaagatatatagcataacaccctctgaaggtctgagagactggcattgtacgtcacctgaaaatcaggttagggcattgttaaaagccgctctctggaaaagcgtattgttaatcgcaacgcatgaataaacaacggtttcaagggaatttttatcgtttccgggggttgaatacgctgccggatgacgacttaacgtttcatccggcgttccttgcaagcgggaggaaacagcgccctccccggcatattactcttcgctatcaccgctgctggcacggcgaggagagtcgatctcaacacgatcgatacgctgcaaaccgcgcatcaacgtaccgcggcgtccacgttcgccagtgactttctgtagctcttccggacgcagtttaattttgcgtttcccaacatgaatggtcagcgtgctttgcggcggcagaacgtacagttgcgccaggccatcctcgccacgcgcggcttctgccgatggaatgttgataatcttgttgcctttgcccttcgacagctgcggcagatcgcttaccgggaacatcaacatacggcctgcctgagtgattgccagcagcatatcggaagcatcttcaatcaccaccggcggcataacatgggcattttccggtaaggtgatcaaagccttacctgcacggttacgcgccaccagatcgttaaaggtgcagacgaaaccgtaacccgcatcggaagccatcagcagtttctgatcgtcgctttccatcagcatatggtcaacggtcgctccagggggcaacgttaatttgccggtgagcggctcgccctgaccacgcgccgacggcagcgtaatcgggtcgatggcatagctacgaccggtggaatcaacaaacactaccggttggttgctcttacctttcaccgccgctttgaagctatcgcccgctttataattcaggcccggcgcgtcgatatcatggcctttagcgctgcgtacccagcccatctgcgacagcacaatggtgacaggttcagacggcagcatgtcgtgctcgctcatcgctttcgcttcttcgcgttcctgcaacggcgaacgacgttcgtcaccgtaggcttgcgcgtctgcctgcagttctttcttcagcaggttattcattttacgctcggaagccaaaatgccctgcaactggtcgcgctctttttccagctcactctgctcaccgcgaatcttcatctcttccagtttggcaagatgacgcagtttcagttcgaggatcgcttccgcctgggtttccgtaaggccaaaccgcgacatcagcgccggtttcggttcatcttcattacgaatgatctcaatcacttcgtcgatattgagaaacgccaccagcaaaccttcgaggatatgcaggcgcttgaggactttctccagacgatagttcagtcggcggcgcacggtatcgcggcggaacaccagccattcggagaggatttccagcaggtttttcaccgccggacgaccatccagaccgatcatattgaggttaatgcgatagctcttttccagatcggtggtagcaaagaggtggttcatcacctgatccatatccacgcggttggaacgcggcacaatcaccagacgggtcgggttctcgtggtcagattcatcgcgcagatcgtcaaccatcggcagctttttgttgcgcatttgcgcagcaatttgctccagtacgcgcgcacctgaaacctgatgcggcaatgcgctgataaccaccgcgccatcttctttcttccacaccgcgcgcatacgcactgaaccacgtccgttctcgtagattttacgaatctcggcgcgcgaagtgataatttccgcttcagtcggataatccggcccctgcacgatatccagcagctgatcgagcgtggttttcggttggtcgattaatgcgattgccgcctgagccacttcacgcaggttatgcggtggaatatcggtcgccatgccgacggcaataccggtggtgccgttaagcaaaatgtttggcagacgggcaggtagcattttcggctcctgcaaagtgccgtcgaagtttggcacccagtcagccgtcccctgccccagctcgctcaatagcagttcggaatatttcgacaaccgggattcggtgtaacgcattgccgcgaacgatttcggatcgtccggcgcaccccagttcccctgaccatcaaccagcggataacggtaagagaacggctgcgccatcaggaccatcgcttcataacaggcactatcgccgtgcggatggtatttacccagtacgtcaccgacggtacgggcagattttttaaatttggcgctggcattcaggcccagttcagacatcgcatacacaatgcgccgctgaacgggtttcagaccatcaccaataaacggcaacgcacggtccatgatcacgtacatggagtagtttaagtaggcgttttccgtaaattcatgtagcgcaaggcgctctgccatatcgctcattaattctgattcctcaacttattcgccagccttcaaaggggcaatattgccggagatactacattatctgccgcgtcgagtcacaggagatcagcgtgaatagcgccgccggacgtgctccgacggcgataaaggcatcaatgtgccttgatatacaactctttgctgtagacataatcctggggattatgcagcggaaaaccgccaacgtagggtttaagcagtttgattaacggctgatagtagatgggaatcagcggtgcctgctggttgatgatcacttctgcctgctgatacaacgcattacgctttgttgcatcagtgatctgcgtggcctggtttagtaaggcgtcatactgcgcatttttccagtgaccgacgttttcttcactatcgcttttgagcgtgttcaggaagctggaggcatcattgtacgtcgcatcccacgactgccgagacagcataaaatcaccggctcgtcgggcatcaagataggttttccactccattgtgcgcagcgtcacctgtgcacccagccattttttccattcggaagacaacgctatcgcggtcttttcatgcagatcgtacttgttgtagaacagctcaaagcgtagcggatgagaggcgtcgtatcccgcctgtttcagcaagacttttgccatcgcgacacgctcactcattggcttttgcagttcatcgaacgtcgtcgcgctaaagccttttacctctggcggcgtcagcgtggttgcgggcgttctcaaccccagtaccttttgcgcaataagctgtcgatcaaccgtaagatatagcgcccgacgcacccgcacatcgttaaatggcggtttctcaaggttaaagttgtaatattcgctgttcagacgcgggataattcgtagctcgccaggcagtgatttttcaatggcgggaatttgctgcgccggaacccaggtgagatcgacctctcccgcgcgatagcggttatagccggtgaccgaattatccagcgccagatactcaacctgttgcaatactgtatgttgcgcatcgcggtactttggatttttgcgtgcagtaatcttttcgttaactacccatttatcaagcacaaaggcaccgttgtaaaccatgttctctggcttactccagctatcgccatgtttagcgatgacatgatgaggaaccgggaacagcgtcggccaggcgagcatcgtcgtgaaccaaggaactggctgctcaagcgtaacttcaagagtacgatcatccgtcgctttgacacccagcgatgtaacatctgctttacccgcaacaatagccgcggcattgttaatgtgcgcctgtgccagatagccagcaaaagggcttgccgttttcgggtcaaccgcgcgctgccagccgaggacaaaatcctctgccgtcagaggctgaccgtctgaccactgcaaaccgctacgcagatggaaaatatagcgcttgccgccgtcaagtatctcccagcgttcagcctgagcgggctgcacctggccttcaccgtccatccataccagaccttcaaacagatccagcacaatctgcgcggcagtattctcctctaccttttgcgggtcgagcgtgcctgggtcgctatgattgttgtaacgaaagacttgttgcggggcgagcggtgtgttggcgggaacgtcagcagcgtagagaggagccgcacttaccaggctgaccagccataataaatttcgcgtatacatggtattccttaccggagaaattataagcccgacaacaatacgcctgtggcattgtttgctcaaacttatcgcgagtgatttggctcacactccggtaaagattccccatcacgccaacggcacataaatatccgtttccagtcgccgctctgtcatctcttcggcaagattggtgtagtgaaacaggatcggggctttgcgcattttttcgccgcttgcaggtagccagtggcgaatgatgccccatatcgtgtgtgaaatatcgtccagctcgccaacatggcgggcaacagcataacgcccaccggtaagttcgccattactcacgccataacgattatcggggatcggttcgctaacgctgccgcagatatcaaagcgaaacgcttccggtgcggtggtggcagggtcgtcccaggcgacgccaaaagtctggctttggttaacaggagaaagccccgtctctttacgccacatgataaatttcgccacgctgtagttgagcaactcagggctacagcggtgcggcaacatcgccacagggattgatgggaaatcgataatatttacatccagtgtcaggtttgtcattttgcctccctgcgaaattattcccgggaacgcgtcccgggagcggtaacaattacggatttactttgcggatctgtttgacgtcaatttcaacagaattccagtctttatcgacttccccctgaatctcaaccgtatctttcggcgtcaccgtcacgccgttccagcgtttgtggtcgatatcaacattgatagtaccgctggcatctttgaacacatagagatcgtcagagatgcgttcaacgatattgccgcgtagggttacccaggtgtcgtcacgcagggattttgcgctttctacggtcgttacgctgccgttcggcccctggaatcctccggcctgactttgcgttgtcgatgggccagaaaaacctccctgctctgctgccataaccggtgtactgcacagggccattactgcgattactgctgcgaattttttcatgtttattactccctttaatgtctgtttccgagcatttaacaagatagtccttaacaacttcttaagggaaaaaaataaaatttaatgctgtacagagcgcgttacaacacggtttactggcagcaaatacggttatcgcagggatgaaaaaatgcgaattttactgatagaagatgacatgctgattggcgacggcatcaaaacgggccttagtaaaatgggttttcgcgtcgactggtttacacaaggtcgtcagggaaaagaggcgctatatagcgcaccttatgatgcggtgatcctggatttaaccttaccgggcatggatggtcgcgatattttgcgcgaatggcgagaaaaaggtcagcgtgagccggtattgatcctgactgcgcgcgatgcgctggcggaacgtgtagaagggctgcgtctgggagctgacgattatctgtgtaaaccttttgcgttgatagaagtcgccgccaggctggaagctctgatgcgccgaaccaacggccaggccagcaacgagctgcgccacggcaacgtcatgctagaccccggcaaacgtatcgccacgctggctggcgaacccttaacgctgaaaccaaaagaatttgccctgctggaattactgatgcgtaacgctggtcgggtactgccgcgcaaactgattgaagagaaactgtatacctgggacgaagaggtcaccagtaatgccgttgaagtgcatgtgcatcatctgcgacgcaaactcggcagtgattttattcgtaccgtgcatggtattggctacacattaggtgagaaatgaaatttacccaacgtcttagtctgcgagtcaggctgacgctaatctttttaattctggcctcggtgacctggctgctttccagctttgtcgcctggaaacaaacaacggataacgtcgatgagttgttcgacacccaactgatgctgtttgccaaacggttaagtacgctcgatctcaacgaaatcaacgcggcggatcgcatggcacagacgccaaataaattaaaacacggtcatgttgatgacgatgcgctgacttttgccatctttacccacgacggcagaatggtccttaacgatggcgataacggagaagatattccctatagctatcagcgggaaggttttgctgacgggcaactggtcggtgaagacgatccctggcgttttgtctggatgacctcacctgatggcaaatatcgcatcgttgtgggtcaggaatgggaataccgtgaagacatggcgctggcgattgttgccggacaattgatcccgtggctggtcgcactgccgattatgttaatcatcatgatggtactactgggtcgtgaactcgcgccgctgaacaaactggcgctggcactacgtatgcgtgacccagactcggaaaaaccactaaacgcgacgggcgtacccagcgaagtgcgcccactggttgagtcgctaaatcaactgttcgcccgcacacatacgatgatggttcgtgaacgacgctttacctccgacgcagctcacgaacttcgtagcccgttaacggcgctgaaagtgcaaaccgaagttgctcaactctctgacgatgatccgcaggcgcggaaaaaagcgctgctccaattacattccgggatcgatcgcgctactcgtctggttgatcaactgctcacgctatcgcggctggactcactggataaccttcaggacgtcgcggagatcccgcttgaagatctcctgcaatcgtcggtgatggatatttaccacacggcgcagcaggcgaaaattgacgtgcgactgacactcaaagccaacggcatcaaacgcaccggacaaccgctattgctaagtttgttggtgcgaaatttgctggataacgccgtgcgttacagtccacaaggtagcgtggtagacgtcacgctgaatgccgataatttcatcgtgagggataacggccccggtgtgacaccagaggcactggcgcgaattggcgaacgcttctatcgcccacccggacaaaccgctaccggcagtggacttgggctatcgattgtccagcgaatcgccaaattgcatggcatgaatgttgattttgggaatgcggaacaaggtggatttgaggcgaaggtaagctggtaacttctctgtctatgagagccgttaaaacgactctcatagactttactaatagcaaaatataaaccgtccccaaaaaagccaccaaccacaacccagacaaataacgagcgagaatacatatagccaaaactcgaacatttcccgcataaagagttttcttaagataagaataataagtggtgtcagaagaaaaaatgctgcaatcattgcttgcaatatacgatcttcgcctgaaacagaaggtatactgcaaatattgtctcccgactcaagcatccagtcatacttattgaaagcaaaaaaagaatctattaaccaataagtaagcattatatataatagtgcttcaaatattgatagtagttgtttttttaacatatctgattactcattaatcaattttttgatatgttctctaatctctaacaacctcataccataagagatgaatttataatcatctgtatcacgcgcaggcaaattattaattaaacaaataaaaaaacccaaatctcgttcaacaccacgattatatctaataccagccataatatactgctcattcgtcatatacagtgttgccgaagagggataatcaaaaagaacaagatctcttaaataagtagcagcaatttgaaaggtaaaatcatcctccattaggcatgtcgctaactctaactgatttctggtagttaattctgaagggtctagacctagagtaatcgctgcggttcgtatttgtatacccattgagccaaatgatgttttattttcaggcatatctaacaatccgatcattctttttgtttcatatatctgaaacttataattttcaggcatacctcctgactcaatccaggccacgccgcccagtaactctggacgaattccagcggcgtatgcatgtttaattattttgtctctattatattgtacatatgcatctttataagcatttaaataatatactcctgaacggcgacgcgaatcattttttcctaacttccagagtaaaacgtccatttcatcccatttacggaacttcgcttgtggaattgtacaatatctattttttatagtgagatcgcttttcatatttaaaaaatcctttcttcccaacaactatatgattccgtactcgcgatatggtgcttccatgttatatttttataattaagaacaatgacatcttccggctgattacccgcatgtgtaattgagtgtggataacatgtcagaatattcgataaatgtgctccttgcaattcaattgtgtaaaacctttcaatacaaccgccagaattaattctataaaaattaaatacagctgataactcttcattttcagaaagagcggcatttaataaaggggaggatttatctattggcttgtaaaattttatggggtgatgcactacattatactctcgacttaaagaatggtcgaactgtaaaacaaaaatttcatccacatgatttatttgatatttattaccaatagatgcatacgaaccacaaccctcagagatcaaaccttgtattttccctttaattgataagtatatcatatttgacatatatattctccataatcattttttccgaaaaactcctgtatcatttgcataatacatctctcctgtgggagcttatgggaagttgatttaagtattgtcattttcagaaaatatttatcccgcatcggtgaatcagagaaagatcagacttttgctaaattcgcaaaagactttgcacattttgctaatttcaccgtaccgctctgtgacgtactatagtcggcaaacgtctcaccttgaggttaaaaaatgagcaacatcctgattatcaacggcgcgaaaaaattcgcccactccaatggtcaactgaacgacaccctgaccgaagtcgcggatggcacactgcgcgacctcgggcatgatgtccgcattgttcgcgccgacagcgactacgatgtcaaagcggaagtacaaaactttctctgggctgatgtggtgatctggcagatgccaggctggtggatgggcgcgccgtggacagtgaaaaaatatattgatgatgtattcaccgaaggtcacgggactctgtatgccagcgatggtcgtacccgcaaagatccatcaaaaaaatacggttccggcggcctggtacagggcaaaaaatatatgctttcactgacctggaacgcaccaatggaagccttcaccgaaaaagatcagttcttccacggcgttggtgttgacggtgtgtacctgccgttccataaagcaaaccaattccttggcatggaaccgctgccgacatttatcgctaatgacgtgataaaaatgcctgatgttccccgctatactgaagaatatcgcaagcatcttgtggaaatttttggttaactagagctctggctttagaaggagttaaccatgattacagtaatcgcagaaatccgtactcgtcctggtcaacatcaccgtcaggcagtgttggatcagtttgctaaaatcgttccaaccgtactgaaagaagaaggttgccacggctatgcgccaatggtggattgcgctgctggcgtgagtttccagtctatggcaccggattctatcgtgatgattgagcagtgggaaagcatcgcgcatcttgaagcgcatctgcaaaccccgcacatgaaagcatatagcgaagccgtaaaaggtgacgtgctggagatgaatattcgtatcctgcagccggggctttgacatttctaaaaagaggccggtgctgctaccggtctcagcccagattagccattctttcttcccgttttcagtcctcgatggaaatcgttaattcgcttaatggttttaaccgcacgctgcggcactgcggaagctaccgaccagacaatcatttccagacacaacaataccgtaccatgtagcggcgttttccctttttcatccccgcgcggaacatgaatcacgatactggcgtctttgctaaaacgtgaatccagcgcgtttgtcagcaaaataacagggatccccagccgcctcgcctcacgaagcgttgtcagcccttcccggtgcgcagatttttgcgccatcatgatcagaacatcgccacgttgaagcgcgatcagttgctcggcaaggccaatacccgtacggtttagtgccgtggcaggcaaacctatgcggttgaatagtcgtgcggtatagtccgccagaatacccgaagcgccaataccaaaaatagcgacttgccgtgcctgcaccaacaacgctacagcttgcgcaagcgcgtggcggttttcaggctctgacaggacattacaggtatacaaatgcccttcaagaacaaagtcgattgcggtgttaacatcgctcgtcaagttactcaccgtcgtagacatcttttcgctggaactaagggctggaccaagccactgttccagagtgcgtttcagatcacgcagcccggcaaaccccagggcctgtatagccctgataactgtggcatcggaagtgttcaacgtggccgcaatttccatcgccgtttgctcgagtaccacttcacgatgctcattaatgtagctggcgacaactcttaacccaggcgttaactgactcgcgcgagtgcgaaaacgctcaccaaaaatatcaacccgcactttatctttctggatcatttatcttccggtagaggtcgccctgcaatttgtgattgtatctgcgcagccatcagccccagagatgcaaaggagttagaaattgcctcttcacgagaaatcagcacataacgcccggaacgacaggcagtcagaaactgacaccatcccggcatgactttttccattgctgccagctcatcctgaggtttaccaccggtgtcaccgcgccaggttgcaaaaacaaaatcggcatccagttcaggtaaacgctccgcgctcacatccattcgcccaccttcaggaatgctctcaatcagcggcggaaaacgaaaaccagcatcgcgtaatacccgtcccagcgaatgatagctatgcatcacattaatttttccctggtttgcctgaatcaccgataccgttattttttggctgtccagcgtcgccttcagcgcattgatttgtgcctgatagcggcgttcaagtatcgccagctgcgactgcgttcctgtaagttctgccagcttgcgatagatttctggcgcgccccctttgagatgatcaatgctcaccgtgggcgcaattttttcaagttgttcaatgggcgtattacgggtcggttctgtgatgatcaggtcaggctttgccgccacaatcgcttcaatatcaatatcagcggtaccaataaaggcgatcgatgaattatcaaagtcgacacctgtcaataacgcgccagatcgaatgaaatggctaccgtcaggccgagttcgcccgtggctggcgacaggaggtacaccgagctcaatcagaggaatagtgatatcaagatcgtgtaaagagacaattctctttggatgagcaggaacagtgactttgcgccctaaatcatcagtaaatacctgaacaggttctgttgcacgggaaaaaaatgacaacagtatcagcagagaaaaaaataaacgcatataactcccgttaaaaactgttcctgcgctgccagagcagtagcaaaaaaaatggtccaccaatcagtgagataatgattccggcaggcagttgcaaaggcaaaaaagccaaacgaccaatgctatccgccagaataactaacaacgcccccgataccgcgctccccagcagtaatgtcgtctgcccgccacgtagaataaaacgtgatatatggggtgctatcaatccgacaaaaccgatgttaccaacacacgaaacgcagacggctgtcaggattatgggtgcggcgacacgtaacaacgccagacgagaactattcacccctaacccggttgcaacctgatgaccaagcagagcgatatccgcagtcctggcggtgaacagcaataaaagagcggctggcaacatccaacaggctgaaataccgactaacatccagttagctgcatgcaggcttcccgataaccacatcaatgcagtttgtacatctcgaacatctgcagtggtcataaatacaccgataccggcggcgaaaaaccaggaaacaccaataccaatcagaacaaatcgcgggcgggaaatatcgcgcgcacaaaaaatcacgattaaagccaccaacaggccaccagcaagaccagccactggacgccagaacattcccagcattggaaactggaaaatcagccacagcacagccacgctacatccttctttgacgccgattaaaccaggatcggcaaggccattacgtgcaatggattgcattgcggcccccgccatacctaacatggccccgcatagcaatgccatgatgactctcggcaagcgaatatcctgcacaatataacgtgcgtctgtgcttacgttttctggagcaaacaacgctcgtcctacttccgatgccggaacaaagaaagaaccctgcatcagaccgaatatcagtattccaaccgcaaacagaaacaacccaccaagcaacaccagatttttagggcgtaccagtgtcgaaaacttaccaacacgtagtggtcgtagcccgacgttcattatccgactcatttgaacatcctcgtcgccataatgacaaaaacgggcgcaccaactaacgccgtcatgacaccggtcgctaactcatggggcgtgaaaagcgtccgggcaataatatctgccagtaataacaaaagtgcgccgacacaagctgaaagagggagcagaacgcgcagatccgctgataccagacgccggacaatctgcggtactagcaggccgacaaaaccaatggggccagcaatcgatacggctgcgccacagagcaacgcgatcgcaagcagggtaaatgttcgcgtgcggagtacagagacgcccagcccctgcgccatgcgatcgcccagtgccaacatgttaagggagggtgcaaggtaaagggctaacacaaatccccccagagaaaaccaggcggacgtacccagcgtcgcccaatcctgccccgctaaatcacctgctagccatgtccgcatcgccagcagtgtttgttcgtcaagaatcaggattgcagccgttattgaggacacgaacgccgatagcgccacgccgcataaagtaactttcattggcgttacccctgaacgccctgcggaggaaagcagcaatatcaacaggaacaataacgcgccccccgtagatgccagcagtgggcgtccaaccggaaaggccagtccaagcgcactggcggcaacgacagcaagagcggctccggcatttaagcctaaaatatgtggctcccccaatgggttacgaatgacagcctgcaacaaagcaccagcaacaccaagagaagcaccggtaagcaatgctgccgctaaacgcggcaaacggagtcttacaattacgttgtgatcgaagttttgcggatcaaaatgaagaaatgcctgcaacaccgtttgtggtgcaataaatcgggcaccaatccctggatataccacgcatcccaccagcagtaaggcgaggaaaattacagtaaccagccctgtgcgcatcatactttttctacaccacgaaacggcatgaagaacggctttcccgtcagaggatttattgatgcgtgaacatcaacgtcaaagaccgcttttaccagttcaggcgtgcaatgctccccctcattcaacacacgcaccactttcccctggcgtaaaaatatcaacgtatcgccataattgacggcaaaattcagatcatgcaacaccacgacgactgtacgcccgtgatgacgcgttaaatcatgtaataactcaagaatttcaacctgataacgtaaatcaagccaggttgtgggttcatccagcaggatataaggcgtcttttgcgccaacaccatcgcaatccagcaacgctggcgctgcccaccagagagtttttcaacaggtaaatgtgcaaactcctgcgtaccggttaatttcagggcatcttccaccgcctgctcatcggcgtcgctccattgacgtatgaaattttgccagggaaaaagcccacgcgacaccagttcataaacggttaagccctccggcaataatggcgactgcggcaagatcccaagtctacgggataacgctttcgttggttgctcgtgaatcgctttgccatcaagcaatatcgaaccgcccataggttgcaagatacgtgcaatggtgctgagcaacgtcgactttccacagccgtttgccccaaccagaacggtcattttttctgtgggaacggagaaagaaacaccatcaacaatgatcttcttgtgatacccggcagaaacattgtcgaggatcagcccctgcccttttgcgttatgtgccacgtgtacgccaacttaatcaaagacaaacaaaaataaaactcattctcctttgagagtttgacgccacaaaatgtagtagtcaagcagttaaaagccacacaaaaacaaggtaaataacaggtaaactatttttatacataaaaataaaaacattaaatatcaataaattaaaagcaatcaaattgtataaacttttcataaaaacacatgtagcaattttttgttatttctcatttactactacattactgcgtgattgaatgattctcaattacatatccgatggcgaaataacaaacggatagtgcttagtgagcaataagaaacaattttcactcgcgacaatccgcgagtttttgggataacagactaaatggctatgttcacaccttcattctcaggactcaaaggtcgggcgctcttttcactgctttttgcggcaccgatgattcatgcaacagactctgtaacgaccaaagatggcgaaacaatcactgttacagcagatgcaaataccgcaactgaggcaaccgatggttatcaacctctgagcacctccacggcgacattaaccgatatgccgatgctggatatcccgcaggtggtcaatacggttagcgatcaggttctggaaaaccagaatgcgacaacgctggatgaggcgctttataacgtcagtaacgtggtacagaccaatacattaggcgggactcaggatgcttttgtacgccgtgggtttggcgcaaaccgggatggctccatcatgaccaacggtctgcgaaccgtacttcctcgtagtttcaacgccgcaacagagcgtgtggaagtgctaaaaggcccggcctccacgctgtatggcattctcgatcctggcggactgattaacgtcgtgaccaagcgcccggaaaaaacattccatggttcggtttcagccacctcctccagttttggtggcggcactgggcaacttgatatcacaggtcccattgaaggcactcagctggcgtatcgccttaccggggaagtgcaggatgaagattactggcgaaacttcggtaaagagcgcagtacatttattgccccgtcactcacctggtttggtgataatgcaacagtaaccatgctctattcccatcgggactataaaactccattcgatcgtggaacgattttcgaccttacgacgaaacagcccgtaaacgttgatcgaaaaatacgttttgacgaaccgtttaatattacagatggtcagtccgatctggcgcaactcaacgcagaatatcatctcaatagccagtggacagcgcgctttgattacagctacagccaggataaatacagcgataatcaggcgcgtgttaccgcgtatgatgcaacgacaggaacactgacacggcgtgttgatgcaactcagggatctacccagcgtatgcatgctactcgtgcggatctgcaagggaatgttgatattgccggattctataatgagattctgggtggggtgtcatatgaatattatgatcttctgcgtacagatatgattcgctgtaaaaaagctaaagatttcaatatatacaaccctgtttatggtaataccagcaaatgtacaacggtttcggcgtcggacagcgatcagacgatcaaacaggagaactactcagcttatgcacaggacgcgctctatctgaccgataactggattgccgtcgccgggatccgctatcagtattacacgcaatatgcgggtaaaggccgtccttttaatgtcaatactgacagccgcgatgaacaatggacgcccaaactggggttagtctacaaactgacgccatcggtatccttatttgccaattattcgcaaacatttatgccgcagtcgtcaattgccagctacattggcgatcttccaccagaatcatctaatgcttacgaagtcggggcaaaattcgagctattcgatggtatcaccgcagatattgcgctgtttgatatccataaacgtaatgtgttgtataccgaaagtattggtgatgaaaccatcgccaaaacggcaggccgcgttcgttcaagaggggtagaagtcgaccttgcgggagcattaactgaaaacattaatatcattgccagctacggctataccgatgcaaaggttctggaagatcctgattatgcagggaaaccattgccgaatgttcctcgtcataccggttcgctattcctgacctatgatattcataacatgccaggcaataacacactgacgtttggcggtggcggacatggtgtaagccgtcgttcggcaaccaatggggctgactattatctgcctggctatttcgttgccgatgccttcgccgcatacaaaatgaaattgcagtatccggtcactctgcaattaaacgtcaaaaacctgtttgataaaacgtattacacctcttccatcgccacaaataatctgggcaaccagattggcgatccgcgtgaagtgcaattcacggtgaaaatggaattttgatcaaaaaagcccggtatacacttgtataccgggctatgttttattcttctggcgggaggattatcagacctcaatctctgccatgtcgcctttttcttgcaaccaattgcggcgatcttccgagcgtttcttcgccagcagcatatccatcatcgcgtcagtacgctgatcgtcttcatcatcgatagtcaactgcaccagacggcgagtgttcggatcaagcgtggtttcgcgcaattgcatcgggttcatttccccgagacctttaaaacgctggacgtttggcttgcctttcttgcgttttaattgctcaagtacgccctctttctcttcttccgtcagcgcgtaataaacctctttcccgaggtcaatacggtagagcggtggcagtgcaacgtaaacgtgaccgtgtttcaccaatgcgcggaagtgttttacaaacaaagcgcagagcagcgtggcaatgtgcagaccatcggagtcagcatccgccaggatacagatcttgccgtaacgaagctggctcaaatcgtcgctgtcaggatcgataccgatagctaccgaaatatcgtgcacttcctgcgaagccagcacttcgtcggaagagacttcccaggtattaaggatcttacctttcagtggcatgatcgcctgatattcgcgatcgcgcgcctgcttggcagatccgcctgcggagtcaccttccacaaggaatagttcggtacggttaagatcctgcgcggtacagtcagccaatttaccaggcaacgccgggccgctggttagctttttacgcaccacttttttagccgcacgcatacgacgctgggcgctggaaatcgccatctctgccaacagctccgccgcctgaacgttctggttcagccacaggatgaaggcatctttcaccacgcccgaaacgaatgccgcacactgacgcgaagagagacgttctttggtctgcccggcaaactgcggatcctgcatttttactgacagcacataggcgcagcgatcccagatatcttccgccgacagctttacaccgcgcggcagaatgttgcggtattcacagaactcacgcatcgcgtccagcaggccctgacgcaggccattaacatgggtaccgccctgcatcgttgggatcaggttgacgtagctttcggtcagcagttcaccgccttccggcagccacagtagcgcccagtccaccgcttcagtatcgccagcgaaattaccgataaacggtttttctggcagcgtcggtaaaccgtttaccgcttccgccaggtaatcattcagaccgtcctgatagcaccagcgctgttcggtgttgttgatctcatctttaaaagtgatctcaacgcccgggcacagtaccgctttggctttcagcacatgcgtcaggcgtgaaacagaaaaacgcgggctgtcaaagaaggtttcatccggccagaagtgcacgctggtaccggtattgcgtttaccgcaagtgccgacaacctgtaaatcttgcaccttttcgccattttcaaaggcgatgttatagatctgaccatcgcggcgtacgttaacttctacgcgcttcgacagggcgttaactaccgaaatccccacgccatgcaggccgccagagaactggtaatttttgttagagaatttaccgcccgcgtgcagacggcaaagaatcagttcaaccgccggtaccccctcttccgggtgaatatctaccggcatcccgcgcccatcgtcaatcacttctaacgactggtcggcatgtaagattacatccacgcgttttgcgtggcccgccagtgcttcatcgacactgttatcaataacttcttgccccaaatggttagggcgagtggtatcggtatacatccccggacggcggcgaaccggctcaagcccggtgagtacctcaatggcatcagcgttataagtttgcgtcatggtttaagttagcaattcgagttgatcgtcagagatggtgcagaccaagaaaatcgacgatcgggttgaaataatcttcgaagcccgtgaatgcgtggttgccgccttctatgacagtctggcggcaggaagcgtagtacgccaccgcctggcggtaatccagcacttcatctcccgtctgttgcagcagccagatcaaatccggcgcttccagcgggtcaatctgcatgactttgagatcgtaaatatggcgtgactctagcacatattgctgcccggtgtaggggttctcgttctgaccgagatagtccgtcagcagttcaaacgggcgcaccgccgggttgaccaccactgcgggcagcataaaacattgcgacaaccaggtggcgtaatatccccccagtgacgaaccgacaatacccagcgaatcgccgccatgttccaggacaatggattccagcagttctgccgcgtcagaaggatacggcggcaactgcggaatgatcatctcaacgtcagggtgatgttccgccagccagttttttaacaagctcgcttttgcagagcgcggcgagctgttgaaaccgtgtaaataaagaagcgtagacatcagtagccttctgaagcggtatcaggttggaagcgtgcgtccgccaggcgatgcacctcggtggtcagcgtgccatcagcatgtaactcgagagtacgccagccgggcgcgatggtgtccagcgtaaagttagaacagtgcggcttaaactgcacacaggtcgacggcgttgccagcaagcggcgaccgttccagtcgagatccagctcctgatgaatatgaccgcacagcaagtatttgacgtgcggaaacttcgccagcacggtatccagttcgcccgcgttacgcaggctgtgttgatcaagccaactacaacccgcaggtagcggatgatgatgcagcagcagcaacgtatggcgttctggcgcatcggccagtttacgttccagccactcaagctgaaactcgctcagctcaccgtgcggcacgccaaacacctggctatccagcaacaggatttgccattgctcaccaataaacacgcgcttcgccggggagatacccgcatcctgtaacgcgctgtacatcgcgggctggaaatcgtggttgcccggcagccagacgcagggcgcacgaaaacttgcgatgccttcagcgaaatgctgataggccgcagaggattgatcctgcgctaaatcacctgtcgcgacaatcaggtcgaattcgtgctggtgtggccgaatcgcctccagcaccgcctggtagctttcccaggtgtttacccctaacagggcttcgtgcttttgtgcaaacaggtgagtgtcggtaatttgtaaaatcctgactctggcctcaccagccagaggaagggttaacaggctttccaaatggtgtccttaggtttcacgacgctaataaaccggaatcgccatcgctccatgtgctaaacagtatcgcaaccagtccgctaaaaactgattaatttgatgcttttcgtcgcgttgatgcaactttttattaggataatcataccgcgctttgaagcgaaaaatctgctggcttgaacacacttcagccaccatcgcgtcatgatacagacgcaccgtcattgacggaaggctccagtaactgatcgcgggcgcagtctgttctattgtcaccagggtagtgtatcgggtcgattccacaatcgtcagccgatattgtgcgtttgccacctgatagcttacagtttcgccgggtgcgtcattgcgcggtaacaaacggcgcaattgtgaaaagttcatctcgcacaggcgcatcatttcaggaaagtcaggtgtgtaacgcttcatttatgcccactcattttttaacgcttgatgatgcagctgcagccattgcaaagcgatgaccgacgctgcgttgtcgattttcccctcttctacccactggtatgcctgttcccggcttaccacatgaacgcgaatatcttcgttttcatcagccagaccgtgaataccgcttgcggtcgtggcgtccacttcgcccaccataattgacgaacgctcactggtgccccccgggcttgccaggaaacttaacaccggtttggtccgtttgactatcagtcccgcctcttcaatcgcttcgcgacgggcaacatcttccacactttcaccctcttcaatcatcccggcaaccatctccagtagccagggggtttcgctggtgtcgtacgcggcaatccgaatctgctcaatcagcacaacttcatcacgcactgggtcaaagggtagcaagactgcggcgtgaccgcgctcaaaaatttcccgccgtacctcatgactcatttgcccgttgaatagacgatgacgaaatctataaagatctaatgaaaaaaagccgcgataaagtgtttctcgtgcaataatttctacatcgtttttgccaaatgtaacgggcaggttgtctggcttaagcattgttaatgtcctggcactaatagtgaattaaatgtgaatttcagcgacgtttgactgccgtttgagcagtcatgtgttaaattgaggcacattaacgccctatggcacgtaacgccaaccttttgcggtagcggcttctgctagaatccgcaataattttacagtttgatcgcgctaaatactgcttcaccacaaggaatgcaaatgaagaaattgctccccattcttatcggcctgagcctctctgggttcagttcgttgagccaggccgagaacctgatgcaagtttatcagcaagcacgccttagtaacccggaattgcgtaagtctgccgccgatcgtgatgctgcctttgaaaaaattaatgaagcgcgcagtccattactgccacagctaggtttaggtgcagattacacctatagcaacggctaccgcgacgcgaacggcatcaactctaacgcgaccagtgcgtccctgcagttaactcaatccatttttgatatgtcgaaatggcgtgcgttaacgctgcaggaaaaagcagctgggattcaggacgtcacgtatcagaccgatcaacaaaccttgatcctcaacaccgcgaccgcttatttcaacgtgttgaatgcgattgacgttctttcctatacacaggcgcaaaaagaagcgatctaccgtcaattagatcaaaccacccaacgttttaacgtgggcctggtagcgatcaccgacgtgcagaacgcccgcgcacagtacgataccgtgctggcgaacgaagtgaccgcacgtaataaccttgataacgcggtagagcagctgcgccagatcaccggtaactactatccggaactggcggcgctgaatgtcgaaaactttaaaaccgacaaaccacagccggttaacacgctgctgaaagaagccgaaaaacgcaacctgtccctgttacaggcacgtttgagccaagacctggcgcgcgagcaaattcgccaggcgcaggacggtcacttaccgactctggatttgacggcctctaccggaatttctgacacctcttacagcggttcaaaaacccgtggtgccgctggtacccagtatgacgatagcaatatgggccagaacaaagttggcctgagcttctcgctgccgatttatcagggcggaatggttaactcgcaggtgaaacaggcccagtacaactttgttggtgccagcgagcaactggaaagcgcgcatcgtagcgtcgtgcaaaccgtacgttcctccttcaacaacattaatgcttctattagtagcattaacgcctacaaacaagccgtagtttccgctcaaagctcattagacgcgatggaagcgggttactcggtcggtacgcgtaccattgttgatgtgttggatgcgaccaccacgctgtacaacgccaagcaagagctggcgaatgcgcgttataactacctgattaatcagctgaatattaagtcagccctgggtacgttgaacgagcaggatctgctggcactgaacaatgcgctgagcaaaccggtttccactaatccggaaaacgttgccccgcaaacgccggaacagaatgctattgctgatggttatgcgcctgatagcccggcacccgtcgttcagcaaacatccgcacgcactaccaccagtaacggtcataaccctttccgtaactgatgacgacgacggggcttcggccccgtctgaacgtaaggcaacgtaaagatacgggttatctgccgcattcttcccccttctcgcttcaatttcgaccagccatcctctattctgatgggtatttaccactggtcccggaagacaaaaatgaaacggacaaaatccatacgccacgcatcgttccgcaaaaactggagcgcacgccatctgacaccagtcgctctcgcggttgccactgtttttatgctggctggctgtgaaaagagtgatgaaacagtgtctctctatcaaaatgctgacgactgttcagctgcaaacccaggcaaaagcgccgaatgtaccaccgcgtacaacaatgcgctgaaagaagccgaacgtactgcgccgaaatacgccacccgtgaagactgtgttgctgaatttggtgaaggtcagtgccagcaggcaccagcccaggctggcatggcaccagaaaaccaggcgcaggcccagcaatccagcgggagtttctggatgccgctgatggccggttacatgatggggcgtctgatgggcggcggcgcgggatttgcacagcagccgctgttctcctcgaaaaacccggccagcccggcttacggtaaatataccgacgcgaccggtaaaaactatggcgcagcccagccaggccgaaccatgaccgtaccgaagacggcaatggcaccaaaaccggcgaccactactactgttacccgtggcggttttggtgaatctgttgccaaacaaagcactatgcagcgtagcgcaaccggcacctcttctcgttcaatgggtggctgataccgatggaaagagtcagtattaccgagcgcccggactggcgcgaaaaagcccacgaatacggtttcaattttcacaccatgtacggcgagccgtactggtgtgaagatgcttactacaagttgaccctcgcccaggttgaaaagctggaagaagtcaccgccgaactgcaccagatgtgcctgaaagtggtggaaaaagtgatcgccagcgatgagctgatgaccaaattccgcattccaaaacacacatggagttttgtgcgccagtcatggctgacgcaccagccatcgctttattcgcgtcttgatctggcatgggatggtactggcgaacctaaacttctggaaaataacgccgatacgccaacgtcactatacgaggcggcgttctttcagtggatctggctggaagatcagcttaacgccggtaacttgccggagggcagcgaccagtttaacagtttgcaagaaaagctgatcgatcgcttcgttgagctgcgtgaacagtatggcttccagttgctgcatctcacctgctgtcgcgacacggtggaagatcgcggaaccattcagtatttgcaggactgcgcaacggaagctgaaatcgctaccgagttcctctacatcgacgatatcgggttaggtgaaaaaggtcagttcacggatttacaggatcaggtgatttccaacctgttcaagctgtatccgtgggaatttatgttgcgtgagatgttctccaccaagctggaggatgcaggcgtacgctggctggaaccggcgtggaagagcattatctccaacaaagcgcttctaccgctactgtgggagatgttcccgaatcacccgaacctgctgcccgcttattttgcggaagatgatcatccgcaaatggaaaaatatgtggttaaaccgatcttctcccgtgaaggcgcaaacgtgtcgatcattgagaacggcaaaaccattgaagcagcggaaggtccgtatggcgaagaagggatgattgttcagcaattccacccgttaccgaaattcggcgacagctatatgctgattggtagctggctggtgaacgatcaacctgccggaattggcattcgtgaagaccgtgcattgatcacccaagatatgtctcggttttatccgcatatttttgttgagtaatacagcttaatattgccccgataagcggggcaatctcttataatccaccattcataactcccatcaatatataaacacatacatatccaacctttatttaacattaatactcaatttaatgttaaatcgtcatatgcaagcgatattgtaattaaagtaagtgaatacatcacaacataactatttgatattatttaaatactttacttttatctcaccagatttaaatttaataattaaaaaacaatgttgcagggatcacactacacagtattgaacattgtgattgatatattgcccccctactatccattaaacataaatatttgtttcaccgaataacaacatatttaaaagaaacacaaaaacattctcactctttattgaattaatatttatattcacgtaacgaatttattagcaccctctcaacagtcgatattcatcattattatatatttgcgttatataaggagatatatccatgtttgataaatatagaaaaacactcgtagccggaactgtggcgataaccctgggtttgtcagcatcgggggtgatggctgcgggttttaaaccagcgccacctgccgggcaactgggtgcggtcattgtcgatccctacggcaatgcaccactgaccgctttggttgacttagatagccatgttatttctgacgtcaaagttaccgtccatgggaagggcgaaaaaggcgtagaaatcagctatcccgtgggtcaggaatcactaaaaacttacgatggtgtaccgatttttggtctttatcagaaatttgctaacaaagtgaccgttgagtggaaagaaaacggcaaggtcatgaaagatgattatgtggtgcacacttcggccatcgtcaataattacatggataaccgctctatctccgatttacaacagaccaaagttattaaagtcgcaccgggttttgaagatcgcctctatctggttaatacccacacctttaccgcccaaggttccgatctccactggcatggtgagaaagataaaaatgccggtatccttgatgcgggtccggcaaccggcgcactcccttttgatatcgcgccctttactttcatcgtcgataccgaaggtgaataccgctggtggctggatcaagacactttctacgatggtcgtgaccgcgatatcaacaagcgtggttatctgatgggtatccgcgaaacgccacgcggcacctttaccgctgtacaaggtcagcactggtacgagttcgacatgatggggcaggtgctcgaagatcacaaactaccgcgcggatttgctgacgccactcatgagtccattgagacgccaaatggcacggtactgttgcgcgtaggtaagagtaactatcgtcgcgatgacggcgtacacgtcaccaccattcgtgaccatatcctcgaagtcgataaatctggtcgcgttgtcgatgtatgggatctgaccaagatcctcgatccgaaacgcgatgcactgctcggcgcgctggatgcaggtgcagtttgcgttaacgttgaccttgcccatgcaggacaacaggcaaaactggaaccagatacaccgttcggcgacgcgctgggtgtagggccaggccgcaactgggcgcacgtgaactctatcgcctatgacgcaaaagatgactctatcatcctctcctctcgccaccagggtgttgtgaagattggtcgtgataagcaagtgaaatggatccttgcgccctctaaaggttgggaaaaaccgctggccagcaagctgctgaaaccggtggacgctaacggtaaacctattacctgtaacgaaaatggcctgtgcgaaaactcagacttcgattttacctacacccagcataccgcctggatttccagtaaaggaacgctcaccatttttgataatggcgatgggcgtcatctggaacaacctgccttaccaaccatgaaatactcccgctttgtggaatataagattgatgagaagaaaggcaccgttcagcaagtgtgggaatacggtaaagaacgtggctacgatttctatagcccgattacctccatcattgaatatcaagccgaccgtaacaccatgtttggcttcggtggttctattcatttgttcgatgtcgggcagccaaccgtcggtaagttgaacgaaatcgattacaaaaccaaagaagtgaaagtggaaatcgacgtgctgtcagataaacccaatcagactcactaccgtgcgctgttagtccgtccacaacagatgttcaaataattaagaagggaataaaaatgtcgaaattagggatctcatcactatttaaaaccatactgcttaccgcagctttggctgtttcatttaccgcttctgcatttaccgaaggcacggattacatggttctggaaaaacctattccgaatgccgacaaaacgctgattaaggtatttagctacgcctgcccgttctgttacaagtacgacaaagcggttaccggtccggtatcggaaaaagtgaaagatatcgttgctttcacgccgttccatctggaaacaaaaggtgaatacggcaaacaagcaagcgaagtctttgcggtcttgatcaataaagataaagcagcaggcatttccttatttgatgctaactctcagtttaagaaagccaagtttgcctactacgcggcttatcacgacaaaaaagaacgctggtctgacggtaaagatccggctgcttttatcaaaaccggtctggatgccgcaggtatgagtcaggcggattttgaagcggcactgaaagaaccagcagttcaagaaacactggaaaaatggaaagcctcttatgatgtcgccaaaatccagggggttccagcctatgtcgttaatggtaagtacttgatctacaccaagagcatcaaatccatcgacgcgatggcagaccttatccgtgagttagcaagcaaataacagggaaacaggctatgggtattaagggaatgtggaaagatcttcgcacatcaccagttgacacactggtcagatggcaggagcaacgcttgttgtggttgttaatggccgttgcgatgggcgcgttaattatcctggcgcactctttcttccagatctatctctacatggcaccctgtgagcaatgtgtatacattcgctacgccatgtttgtgatggttattggaggattggttgcagcgatcaacccaaagaacatcatcctaaagctaattggctgcgtgatggcattttacggcagcattttgggactgaagttttcgctcaaactgaacgatatccaccatgcagtacataatccggatcccgattcactgtttggcgtacagggttgctctaccgatccaacttttccctttaacctgccgctggcacagtgggcaccaaattggttcaagcctaccggggattgtggctatgacgcaccaatcgttcctgatggcgtcacactgagcagcacgcaacagtggtttgtggaaatgtatcagcaatctgaaggctggtatctgctaccaccatggcattttatgaatatggctcaggcttgtatgctggcttttggtatgtgtctggtgctgctggtcattatgagtggcgcatgggcgcttaaaatcatcagaggctaactcagcaacacccgaagccagtcattctggcttcgggttcttttattaacctatctgcaccgacagcatacttaaactgcccatttctataccatcgaccggaatggtaattggctcctgcccatcccacgcccctaagacatacaacaacggcagatagtgctctggcgttgggttcgataacgcgccaccttcatggtcgagataattcaccagaggatgttgttccaccggcccttgccacgtcagattcgctttcacatactcattaaacgacgtcgcccacggatacggtgaactatcaccgtgccacttcactgtacgcaggttatgtaccacgttgccactggcgaccaacattatcccttcatcacgcagcgccgcgagtttgcgccccatttcgaaatgccaggcggcaggtttgctactgtcgatactcaactgcaccatcgggatatcggcgtcagggtacatcttaatcagcacgccccaggaaccgtggtcaaagccccaggcttctttatccagcgccacaggaaccggcgctaacagctcaaccagatgctgtgccagcgcaggtgaacccggagcaggataatgcgtatcgtacagcgcctgcgggaagccaccaaagtcatgaatcgtgggcggcatctccatcgcggtcactcctgttccacgggtaaaccaatgagccgaaaccaccactattgcttgcgggcgtggcaatgtcatccccaacgtctgccagctgcgggtatacaaattatcttccagcacgttcatcggactaccgtgacctaaaaacaatgctggcatacgtgttgaagacatgatgatatccttaactaaaggtgtcattttgatatcctcacaatacgcttgttcggcggagtaagaacccggataacaatgatgatgatcatcagttattttgacgatctgcctgaaggtgaagatttataaggagttgtcgatgtcagtacctctcattctgaccatactggcgggggcagccacgtttattggcgcgtttctcggcgttctcgggcaaaaaccctcgaaccgcttactggcgttttcgctaggatttgcggcggggatcatgttgctcatctcattaatggaaatgcttcctgccgcattagccgccgaaggaatgtcgcctgtgttgggttatggaatgtttatcttcggtctgcttggctattttggcctggaccgcatgttgccacatgcgcatccgcaggatttaatgcaaaaatcggtgcagccgttgccaaaatcgatcaagcgcacagccattctgctcactctcggcatcagtctgcataacttcccggaagggattgccacctttgtcacggcgagcagcaacctggagctgggatttggcatcgccctggccgtagcgttgcacaatattcctgaaggtctggcggttgcaggcccggtttacgctgcaacaggatcgaaacgtaccgcgattctgtgggcgggcatttccgggctggcagaaattcttggtggtgtgctggcatggttaatcctcggtagcatgatttctccggtggtcatggcggcaatcatggcggcggttgcaggaattatggtggcgctctccgttgacgaattaatgccgctcgccaaagagatcgaccccaataataaccccagctatggcgtactatgtggaatgtcagtgatgggattcagtttagtgctgctacaaacggcgggaattggttaaagacgataatgacagatgttgcccattgctaaaggcaacatctgtatcgttattaaaggtattattgatgcttttcaaacacttctttatcggagcgtttatctaatttacttcgggcagctaacagcgcatctctgtcatggcgaaaagctttacagtaacgtttaagatgaagaaaatagccaccagccagtagaacaattaatacaatccagtaccaggcaataaacatccttttcaccttcaaaatttaacattactaaacatttagcgttaaaatttcacatatccatcgttgaatacattcatatactcgcataattctggatcaagtatatgatttcgatcatagtaagtgttgtattatataccatatctggttaaaaaaagaacaaccaagactattaatatatattatcccccgataaaacattactaattaataatataaattaataagcatcgctagatatatattatatcttcacgattattaagcccctactcgttataataagtatacactcccccctttacaacattaggcgtaaacctttgtcaacaaacggttgttttttcgccgcaattcatacaaaaaaattatcacaaataacgataaacaacaaatatctagatatatacacctcaatatataacggggaattatattttaagttttacttaatcagcatttaatataaataacgagtcaaattatctctggttatggtaatgtccatagctgaattaatattaaattcaaacctgtattttcctcatccatttataaaggattatagtcatgttaaaaaaaacattgttatctatgttcgcaaccgcattgttatcaggcgttgcttttaacgctcttgctgacgatgctaatcagggttcaggtaaaattacttttaaaggtgaagttatcgatgcaccttgttctattgctcctggtgatgaagatcagacaataaacctcggtgaagttgctgataccgtattaaaaagcggtcagaaatcactgcctgtagatgtcaccattcatttgcaggattgtattttatctgacggcactaacactgttgataaagtcaaaatcacctttagttctgccagtgttgacgctaccgactccaacctgcttaaaaacactctggaaggtaacatcggcggcgcaactgatgtaggcgtacgtctggtgaaatcagacaacaccaacgtgactcttggcactccaatcactatcaacttcccgacgactaactcttaccaggagttgaactttaaagcccgtatggagtctctgggacgcaccgcgaccccgggtaacgtgcaggcacaggctaattacgtactcgactacaagtaatcggtagtcaatacctacacaacgccaggcggtaaagccgatgaaatttcatcggcaactttgggcctttttagaaatggatttttatgaacaataaaaacacgttttcccgggataagttatcccatgcaattaaaaatgccctgtctggcgttgtgtgttccctactcttcgttttgccagtccacgccgtagaattcaacgtcgatatgattgacgcagaagaccgtgagaatatcgacatctctcgttttgagaaaaaaggctatatcccccctggtagatacctcgttcgtgtgcaaataaataaaaatatgttgccacaaacgttaatactggaatgggtaaaagccgataatgaaagtggttcgttactctgcttaaccaaagaaaatttgactaatttcggtcttaatacggaatttattgaatcattgcaaaacatagctggcagcgaatgtctcgatttaagccaacgtcaggagttaacgacacgacttgataaagctacgatgatattatcgctaagtgttccccaggcatggttaaaataccaggcaacaaactggacgccaccagagttttgggataccggtatcaccgggtttatccttgattacaacgtgtacgccagccagtatgccccacatcacggagacagcacccaaaacgtcagctcctatggtacgttaggctttaacctcggcgcatggcgcttacgtagcgattaccaatataatcagaattttgctgatggacgctcggtaaaccgcgacagcgaatttgcgcgaacttatctgtttcgccctatcccctcctggtcgtcaaaattcactatgggccagtacgacctgagctccaatctttacgataccttccactttactggcgcatcgctggaaagtgatgaaagcatgctgccgccagatttacagggttatgcgccacaaattaccggcatcgcgcagaccaacgcgaaagtaactgtggcacaaaatggtcgtgtactttatcaaaccactgtcgcgccaggcccttttactatttctgatttggggcaatcgtttcaggggcagctggatgtcacagtggaagaagaagatggccgcaccagcaccttccaggttggctccgcatccattccctatttaacccgtaaagggcaagtgcgctataaaacgtcactgggaaaaccgacatccgtcgggcataacgatatcaataatccctttttctggacggcggaagcctcctggggctggctgaacaatgtgtcgttgtatggtggtggcatgttcaccgctgatgattatcaggctatcactaccggtattggctttaaccttaaccaattcggttcgctttcttttgatgtcactggagcagacgcgtctttacagcaacaaaatagcggcaatctgcgtggttacagctatcgcttcaactatgcaaagcatttcgaatcgacaggcagtcagattaccttcgcgggttatcgcttctcagataaagattacgtgtcgatgagtgagtacctcagctcgcgtaatggcgatgagtcaatcgataatgaaaaagagagttatgtcatttccttgaaccagtactttgaaacgctggaattaaactcttatctcaacgttacacgcaatacttattgggacagcgccagcaataccaactactccgtatctgtaagcaaaaactttgatattggcgatttcaaaggtatatctgcatcgctggcagtaagtcgaatccgctgggatgacgacgaagagaatcaatattacttctctttctctctacctttacaacaaaaccgcaacatctcctacagtatgcagcgaacgggaagcagtaatacttcgcagatgatttcctggtacgattcatcagatcgcaacaatatctggaatatttcagcgtcggcaacggacgacaatatacgtgatggcgaaccaacactgcgcggcagctaccagcactattcgccgtggggacgcctgaacattaatggcagtgtacagccgaatcagtacaattctgttaccgcaggctggtacggttcacttaccgctacacgtcatggtgtcgcccttcacgattatagctatggcgataacgcccgcatgatggtcgataccgatggcatctccggcattgaaatcaactctaaccgtaccgttaccaacgggctgggcatcgccgtgataccttcgttatcgaactacaccacctccatgttgcgggtgaacaataacgatctgccagaaggtgtcgatgtcgaaaactcggttattcgtactacgctcacccagggtgccatcggctacgcaaaactgaatgccaccaccggataccaaatcgtcggcgttattcgtcaggaaaatggccgcttccctccactaggtgtgaatgtcacggataaagcgacaggtaaagatgtgggcctggtagcggaagatggcttcgtttatctcagcggtattcaggaaaacagtattctgcatttaacctggggtgataatacctgtgaagtcacgccgccaaaccaaagtaacattagtgaaagcgcgataattttaccttgtaaaacagtcaaataattcaggatgaatataatgaaattaccattaatcacaacaggaatgatttgttttctggggatctgcaactttgcccaggcgactgtctcccccgacaggacacgcatcatttttaatgcttcgaataaaagcgcaacggttcgcctgaccaaccaaagtaaaatcgatccttatcttgctcaatcgtggattgaagatgccagcggtaaaaaaacgcgtgattatatttcaacactgccgccgatggaacgtattgagcctgatgaacaggtacaaattcgcctgatggcgctggcctcgttaaataacttaccacaggaccgagaaacgctattctactataacgtgcgggaaattccgccgcgtgccaaagaacagaatgtcatgcaaatcgccatgcaaagccgtctgaaactgttctggcgaccgaaagcgattgagttaaaagaaggagagatggttcctctgcaaaaagtgacgattacccgcaccgccgccgggctgaccctgaataacccgacgccttatcatattaccgtcggctatatcggcactaatggcaagacactgatgcctggtgcggacagtattatggtggcaccatttgcttctgcgactcaacacttaaacaacctgccctctacgttccagttaggctttgtggcggactacggcgggctggagatgtttaaagtagtatgtaattccgtccagtccctctgccaaagtactcctgcgaagaaggggaaaatatgattacactttttcgactactggcgattctttgccttttttttaacgtttcagcttttgctgttgattgctatcaggatgggtacagaggaacaaccctcataaatggagatttaccaacgttcaaaattccagagaatgcgcaacctgggcaaaaaatttgggagagcggagatattaatatcacagtttattgtgacaatgcaccaggatggtcaagtaataacccatcagaaaatgtctatgcctggatcaaattgccccaaataaatagtgccgatatgttgaataatccgtatttaacatttggcgtgacttataatggtgtagattatgaagggacaaatgaaaaaattgatactcatgcgtgcctggataaatatgaacaatactataatgggtattatcatgaccctgtatgcaatggcagcactcttcaaaaaaatgtaacatttaacgcccattttcgcgtctatgtaaaattcaaaagccgcccggcaggagatcagacggtaaactttggcacagtcaacgtgctgcaattcgacggtgaaggcggggcgaacatggcccccaacgcgaaaaatttacgctatgcgattacggggttagataatatttcattccttgactgtagtgtcgacgtccgcatttccccggaaagtcagatagtcaattttgggcagatcgctgcgaattccattgcaactttcccaccgaaggcagcattcagcgtttctaccataaaagacattgcgtctgattgtaccgaacagtttgatgttgcaaccagtttctttacttcagatacattatatgacaatacgcatctggaaataggtaacggcttgctcatgcgaattactgatcaaaaaacgcaagaagatattaaatttaaccagttcaaattatttagtacttatattcccggtcagagtgcggcaatggcaacccgcgattaccaggccgaattaacccaaaaacctggtgaaccactcgtctatggcccatttcagaaagacctgatagttaaaatcaactaccactaaacagcaaaatgccgggaacaccccggcattttcatatttagtatttcatctcattagctggctttacgctcatgtgcctgacggtatgccaccaggtcttcaatagtcacgagcgccatattgtgtttattggcaaactcaatgcactctggtgcacgcgccatcgtgccatcgtcattagtcagctcacacagcacaccagctggtttaaagcctgccagcgtcatcagatcgatagtcgcttcagtatgaccgccacgcgtcagtacaccacctgcctgcgcacgaagtgggaaaacgtggcccggacgattcagatctgacggttttgcgccatcggcaatcgctgcgcgaacggtcgtaatacggtcagcggcagaaacaccggtagtcacaccttcagctgcttcaatggtcacggtaaaaccggtgccataggcgctggtgttattttctaccatcattggcagatcgagttgtttacggcgatcgtcagtaatgcacaggcaaacaataccactcccgtggcgaatggtcagcgccatctgctcaacggtcatggtttctgccgggaagatcatatcgccttcgttttcacggtcttcatcatcaagcaccatcacaccgcgtccttcacgcagcgcagccagtgcattttcaacacgttcgaaaggcgtaccaaaagaggaaagtagcgtctgattcatggtaaaaaaacctcactaaaattatggttaccagaatcagggcagtcttaggagtggcggcatatagccaaaataacgtgagcgggtccatgcccgacagaatcgttactctctcccatccggactctaaccgtcggccccggaattacaccggatctgctgtcctttgagttcgcacccaaagcgctcgcgggctttcaactgagttgatttaccgccggtggggaatttcgccccgccctgagaataagcggattcactataacgctaatgattagcggcagcaacgcatagcttcacataattctggtttatgacttacccttatcgcactacaatggcactcaacacctatcagtacagggaaactacaatgattgacccgaaaaaaattgagcaaatcgctcgccaggttcacgaatcaatgcctaaaggaatcagggagttcggggaagatgtggagaaaaaaatccgccaaaccctacaagcgcagctgacgcgtctcgatctggtgagccgcgaagaattcgacgtacagacgcaagtcctgttacggactcgtgaaaaactggcgttactggagcagcgcatcagcgaactggaagcgcgctataatccggtagcagaacttcaatctcctccggctatcccgccagttgataaagcagaataaagcaccacaaaaacgggccagacggcccgtaatatcagtgttctaattcaagttctctggtttgcatcatctgttggcaataccaggcataacgtgcgcaaaaccaggttctatgttcttcatccatgttaccagtaacggccagaatatcgaccgggcgaccttctgcgtgcattctggcaaaactacgcgcgagaaaatcgaaattatttaaagaattaagactatgatccataagcacatcctccggttattgcataccttttaaggccatatgctttttctgatttcagtattccccaatcagtgtagtgcctttaaacataacgtgcgtaaatatattgtccccgatcacactttttagtgaaaaataaaaaaaccatattaaaagactttctcttccagaacctctctaacatgtgttattattaacaaagataaatgtaagcaaggaaactattccaaagtaaatattgcgtcactaaatggacattggagtgacatatgattttattcgccgactataacaccccttatcttttcgctatttcctttgtactgttgatcggccttttagaaatttttgcacttatctgcggtcacatgctctccggtgctcttgatgcacatcttgaccattatgattccataaccacaggtcatattagccaggcacttcattatctcaatattggaagattaccagctctcgtcgtcctctgcttactcgctggtttttttggtcttattggcatcctgttgcaacatgcctgcgttacgctctggcaatcaccactccccaacctgttcgtggttcctgtcagtttactgtttacaattattgcagtgcattataccggtaaagtcgttgcaccctggattccacgcgaccatagttcagctattacagaagaagaatatgttggtagcatggcattaattaccggccatcaagccacttcaggtaacccctgcgaaggaaaactcaccgatcaatttggccaaatacattatttgttactggagcctgaagaaggaaaaactttcactaaaggagacaaagtgttaattatttgccgactttctgcaacgcgatatttggcggaaaacaatccctggtcccagatattgtgatttattaatcaaaaggaaatttaataatggatgatatcgttaattctgtgccctcctggatgtttaccgcgattatcgccgtatgcattctgtttattattggaattattttcgccaggctctatcgtcgcgcttcggcagagcaagcatttgttcgtactggtttaagtgggcaaaaagtggtgatgagcggtggcgcaatcgtgatgccgatctttcatgaaataattcccatcaatatgaataccctgaagctggaagtcagccgttctactattgatagcctgattacgaaagatcgtatgcgtgttgatgttgtagtggctttctttgtacgggtaaaaccgtcagtagaaggcatcgccactgcggcccagacgctggggcaacgcactctatcaccagaagatttacgtatgctggtcgaggataaattcgtcgatgccctccgtgcaacagcggcacaaatgaccatgcatgagttacaggatacccgcgagaacttcgtgcagggagtacaaaataccgtagctgaagatctgtcgaaaaatggcctggaactggaaagcgtttcacttaccaactttaaccagacctcgaaagaacatttcaatccgaacaatgcctttgacgccgaaggtttaaccaaactgactcaggagacggagcgccgtcgtcgcgaacgtaacgaagttgaacaggatgtggaagtcgcagtgcgtgagaaaaaccgtgatgcactttcgcgcaagttggagattgaacaacaagaagcgtttatgacgcttgagcaggagcagcaggttaaaacccgtaccgctgagcagaatgcgaaaattgcggcttttgaagctgaacgtcgtcgtgaagcagagcagacgcgaattctggctgaacgacagattcaggaaacagaaatcgaccgcgaacaggccgtccgctcaagaaaggttgaggccgaacgtgaagttcgcattaaagagatcgaacagcagcaggtcaccgaaatcgctaaccagacgaaatcgatcgctattgccgccaaatcggaacaacagtcccaggcagaagcgcgtgctaaccttgcactcgcagaagcagtaagcgcccaacaaaacgtagaaaccactcgccagactgccgaagccgatcgtgctaaacaagtggcgttgatcgccgcagcgcaggatgcagaaaccaaagcggttgaactgaccgtgcgggcgaaagcagaaaaagaagccgcagaaatgcaggcggcggctatcgttgagttagccgaagctacacgtaaaaagggtctggcggaagcagaagcacaacgtgcgctgaacgatgctatcaacgtactttctgatgaacaaaccagccttaaattcaaactggcattattgcaggcgctgcctgcggtaattgagaaatccgttgagcctatgaaggctatcgacggcatcaaaattattcaggtcgatgggctgaatcgtggtggcgctacgggtgatgcaaacacggggaatgtggggggcggaaacctggcagaacaagcgttatcagccgcactctcttaccgcacacaggcaccgctgattgactccttgctcaatgaaattggcgtttcaggcggctcactggcggcattgacttcatccttaagctcaacaactcccgtcgaagaaaaagcagagtaaaccctcttctatgaataatccctggcccaaaaagccggggattttttatatctgcgttccgctaaaaggtgcaaatgatcaggctgttgcagcattttgcgtgactgctcggggaaggcaaaactgcctctgggaaagcgttgcgcggagtccggcgctcatcaacaatcggggagccagcaaggggctgaaacgggaaagcccctcccgaggaaggggccttatagaaggaaagggttatgatgaagttcgtcatcatactggttgtgttgttactgttaagtttcccgacttactaacaactcatcagaggggggagaaatcctcccttacccttgttcctttactttaggttgaaaaaacaacagcgtcaatagacctgcctgctacgaagcgagatctgtgaaccgctttccagttagccttttttatccagttggatcttcttgatgatgttggtcgtcgagcaaccgtcttcaaagttgagcaccagcacttcgccaccgttggcccagacttctttactcccggcaatctcttctggtttatagtcgccgcctttcaccagcagatctggcaagatcccggcgatcaagcgctgcggcgtgtcctcttcaaacgacaccacccagtcgaccgcttccagtgcgcccagcacaatcatacgctgttcgagcgggttaacggggcgggaatcccctttcagccgtttggtggaggcatcgctgttcacagcgacaatcaaacggtcacccagtttacgggcatttgccagataagagacgtgcccggcgtgcaggatgtcaaagacaccgttggtcatcaccactttttcaccgcgtttacgcgctgccgctacagcaagcttcagttcctcttcggtcatcacaccaaagccggtatctgcacgtccacgtactgcgttttccagctcgatcggcgaaaccgtggatgtccccagtttgccgaccaccacaccagccgccgcattggcaaagaagcaggcttcttccagcgaattacccgctgccagcgttgccgccaggacgccaatcaccgtgtcgcccgcaccggtaacgtcatacacttcctgcgcctgggttggcatatgcagcggcgctttacccggttgcagcagcgacataccctgttcggaacgggtcactaacagagccgagagttcgtaatcggcaatcagtttcatgccgcgctcaacaatctcttcttcggtcttacatttaccgacaacagcttcaaattccgagagattcggcgttaacagcgtagcgccgcggtagcgctcaaaatcggtaccttttggatcaatcagcactggaacacccgctttacgcgccagttggatcatctgctgtacgcttgccagcgcacctttggcgtagtcagaaagcaccagcgcgccaatcgaactcagtgcctgattaatccgctcgtgcagcggctgcggatcaaccccttcgaaaccttcttcgaaatccagacggatcagttgttggttgcgggaaagtacccgtaatttggtgatggtcggatgcgtcggtacagaaacaaagtcgcatttgacgttgacgtcggccagagatttactgagcgcgcgcgccgcatcgtcaatgcccgtcaacccgaccaggcgtgcattagcaccgagagaagcgatattcatcgccacgttagccgcgccgcccggacgttcttcgatggtattcactttaaccacgggcaccggcgcttccggcgagatacgactggtgggaccgtaccagtaacgatccagcatcacatcaccaaccaccatcactcctgcacgttcaaactctggcagcgttactttcattcctgtctcctgagagattcaaaatttgcgcgcgataataccatacttcattcttccaccagccacttctgccagcttgcccgcaccagttcacgctctgcggtgaagcaatcctccgacacatggcccggcaattcctgtaatgccagatgatgaagttcatcgcgcagcgtcgtgtaagcacgggtcagcgccatcgcttcctgctcttccataatgtcgttttgcgccagtagttccagaatgcgcacgttgtctgaccagcgcgttaacttcggtttttcgtgagcgtagcgcaacaccagatattgagtaataaattcgatatcggtaattccgccttcatcggctttgatatcaaagcgatcgcgatgtttattgccgagatgggcacgcattttctcgcgcatttcccgcacttctgtttgcagggttttgccttcgcgcggcagcgtcataatctcccggcgtactgcgtcaaagtgcgcggtgagctgcggatcgccgtacactacacgcgcacgcaccagcgcctgatgctcccacgtccaggcctcgtttttctgataatcagcaaatgcttctgcggatgtcaccagcattcccgccgccccggacggacgcagtcgtgcatccacttcatacaaaatgccggaagaggttcgcgtactgaacagatgcataatgcgttgcgccagacgcagataaaactgtcgcccgtcgatttcccgctcgccgtcagtcatcgcatccattgggcaatcatggaggaagatcaggtcaagatcggaactgtagcctaactcccagccacccagcttgccgtagccgaccaccgcaaaaccacgcccttcgcgttcgttcaggtgatttggcttaccgtagcgggcaaccatttgaacccacgcctgctgaacgacggcatcaatcatggcttctgccagccaggttaagtgatcgctcactttcattaccggtagcgtaccggcgatatccgctgccgcaatgcgtaacagctgcgcctgtttgaactgacgcagcgcctcaagctgttgttcttcgtcatcttccggcacgcgcagcaaatactggcgcagttcatcacggtaggcatccgtcgccgttggttggtagagggtatttggatcgagcaattcatccagcaataatggataacgcgctagctggctggcaatcatcggcgatgcagcacacagagaaatcaaatgattaagcgccgcagggaattcactaagcagctcaagataagtggtgcgagtaacaatccccaccagcaaggcggtaatgcgcgacagcgtgacagcagcgtcttcacgcgcacagacatcacttagcagatgtggcatcagatggtcgagcacctgacgtcctcgcggcccgatagtgcgcttatccagctctttgcggaaatcagcaatcagcattagcacctgtttgcgatcatcctcgctaagatgcgccagcactggcgtggtgtcatcttcctgcaacgcatcctgccacagctcacgccactgttccgacagcgactcttcctgagtttcactttcgtcgtcgccaatcaattcattaaacacccggcgcacattggccatatgtgcggtcagcaccccggtcaattgcggccagtcagcaaagtccatcgcccacgccagccgcgcacggttaagctcatcagaaggaagcgtctgggtttgttcgtcgttaatgctttgcagcaggttttccagacgccgcaggaacagatacgccactcgcaattgttcagcatcgttttcagaaagcagatgcagcgcggcaatggcgctgagcgttggcagtaaagcgcgcgattgcagcgacggttcgcgcccgccgcgaatgagctggaacacctggacgataaattcaatttcgcgaatgccgcctgcgccaagtttgatgttgtcggtcaaaccgcgtcgacgcacttcacgggcaatcattcctttcatgttgcgcagcgactgaatcacgctgaaatcgatgtaacgacggaaaacaaacggacgcagcatcgcacgcaactcgttagcatagacgccgtcgctatcccccataatccgcgccttgaccatcgcgtaacgctcccagtcgcgcccctgctcctggtaataatcttccagcgccgcaaaactcagcaccagcgggccactttcaccaaacggacgcagccgcatatccacgcgatagacgaagccatcctgcgttggttgatccagcactttaatcagccgctgccccatgcgggtaaaaaactgcgcgttatccagttcccggcgtccaccctgggtacaaccatgttccggccaggcaaaaatcagatcgatatcagaggagaaattcagttccccgccgcccagcttacccatgcctaaaatcagcagcggttgcgcttcgccctgcgcattgcacggcgttccccattcgcggcagcaggcgtcatacagccagtcacgcgccgcaacaatcagcgtctccgccagatggctgagctgctgcaatatgctctcttcagtaaccagagccagcgtttgcgcccaggcgatgcgcaccataatgcgccgccggaatagccgcagctcgcgcattaacccggcttcgtcactcacattactgagcgcctcctgcagccatgcagcgtaatgctgccattcgtcggcctgcggcggttggctttccagttccgtcagccactctggatgcgcaatcacgctgtcctgcacaaaatcactgaaagtaagtactgacttcgcctgtgcgctaagtgattcctcggctaaaggctctggcagccgctcaacaacggtctgccagtactgctgtaacggtgaagagagcggcttcataagcgattttatccttgcctgattaacgttttccgctgtgcaaccagaacggttcctgattgtttgcctcattacggaaatgttcaatttcaatgcgttgcccggtcgcaatagcgtgacgcagcccctgccagttctccagccagtcttgcgcgacgacaggatcgtagtaacccgccagcaacagtattgagtcaatatcacgcgtcaggcgtggcaattggtcacggtagcgatcgcctaacggctggcagaaaacgcttttcagttcagcggcatggcgggaaagatggatatcggcaaagcgtttgaaggaatcgctgattttgctctgcgctttggcatctaaaaacggctgccaggctttgcttaccagccattcggtcaacgccagcttcgccattgccgtttcggtagagtagaccgccgttacggcagaaaccgcagaagcaatggtcgcctcgcattgagtcagcagatcacgtaagtgagtgctcgctttacgcggcacgataccgccgaacagcatcagtgtatgacggaccaggccaatggctgccagcacctgctctttcgccgcatcgttgccgcgtacccacagttcttcatgatactgccattgcgctaacgccagctcgagcgccgcttccagcccctgttccacatcagcttttgccgcaacatgcaaaatggtggtcggtttgatttcacgcgccggattgccctgcgccagatgatagccacgcgctgctttgctcaggctgccctggcgtaatccggtttgcgataccagttggttcgccagtttcagcaccgcacgcatgtcgccgctaagcagttccagttccagctcacagataggttcagcaaattcacccgctttcacctcaccctgatcgaaagcgatttcaattcggctgccatcgacctctactagccatttttcgcgataaaaatcggtgctaaacagcggctgtacgcgggaagcgagatcggcaggcaattcgccgttcggccagacttccgtcggtaactgcgccaggtcgagcgtcggttcgctcaacgccacgttatattccgggcgctggtgtaagccgcctgtcactcttcctgcaactttcatggtcatctcatagcgaccgttttcgccacgaatacgcaagcccatgtcgtgcccacgcagccagttatccggcgtttcgtagtaaatattcagcaactgcacgggatcatggtgctcgccgcccagcgtattgagatggtcacgcaacgcctcaacggcactgtgattaacaataaactttaattcgatttcctgagccatccttcctccactgggtactccccccaacgtaggcgggaggggaatttgggctgttaagcccgcagtttatcagccacgctgattctgaatatactttttcacaacttccagcggtgctccaccacatgaaccgatgaaataagagcgtgaccagagtacgggctttgaatacgcggcgcgcaaatcaataaaatcattccgcagccgcctactggtaacggacttaaggctgtttaccagctttgtgagttgcaccaacggtgggtattcaatcagcatgtgaacatggtctgcctcgccgtcacattcctttaactcggcgccaaagtccgcgcatacctccgctacatactgacgcatgtttgcatgatgcaattcaccaaaaactggacggcggtattttgtcataaaaacaacgtgaacatgcaacaggtaagctgaatagcgtgaacgattgatttcgcacacgtattgaccctcccaaaaaaatgtggatatattgtacattctaaacaaccacatactgaatgcaaaatgttaatccagaaagcatataaatacaggctctaccccactgaccagcaggcgcaaaggttgcgtcagttgtgcggttgcgctcgctttgtctggaactatgcactgaatgaaacactgagcattcatgacgcgggcggaaaaattccgtcagctttcgacctgaataaacgacttacgggctggaaaaaactccctgagctggcctttctttctgagggttacactgacaacctccagcagaaactgaaagacctgcggagcgcatgggatcgctgttttgataaatccctgacggctgaaaagcccgttttcaaaaagaaaaccaaaggctgcgactctatccggttcgtcaatttcagcaaatattgtgggctggattatggccgtgtgaaactcccgtcaggactgggctgggttaaatttcgtcagtcccggaagattgaaggcgtcattaaaaattgcaccatcagccagcatgccggacactggtatgtgtcttttcaggtcgaattagctgttaccgatccgattcacgcatcgaccagcgcaataggcctggatgcaggtataacgaagctggcaacactttcagacggcacggtctttgaaccggtaaacagcttaaaaaaaaatcaggataagctggctcgcttacagcgccgtctggcccggatggttaaattctccgccaactggaaaaagcagaaagcgaagatttcccgtttccactctcatatcgcaaacatccgccgcgattaccttcataaaaccacgacgacgatcagcaaaaaccacgcgatgatagtcattgaggatttaaaggtttcgaacatgtcaaaatcagcagcgggtacggtagaccagccggggcgcaacgtcgcggcaaaatcaggtcttaaccgggcgatactggatcagggctgggcagaaatgcgccgccagctcgaatataagcaggcatggcgcggcggtgatgtactggcgattaatccggcgtacaccagtcagaaatgcgcatgttgtgggcatacatcgaaaaataaccgcaggacgcaggcgagctttatctgtaccgcgtgcggctatacggcaaacgccgatgtaaacggcgctcgcaatatattaacagcaggttttgaagtcatggcggcaggacaaatattgccgtcagtccgtaaaggacgcgcccgtaaggcggcgtaagccgtcgagcgaggaaccggggaatgcggcaacgtattgctaccctgacaagggaatccccctcctgagtcgctttgcgcgaaggtgggggaggatgtcaaggcctttacttatcggttatgtcacataagtgacgatgaacggcgaacttaatgcgatcttttttgtcagtagatagtattttgcgccaaattgccatgcaacgggcaatttgacgggcgtaaaagtttgaagcagtggcaagacctgacacagaggattccgattgatgtcgaatgctttgcgtagcgacactgatgccactactatcgttccactttccatgacaataacgacagcctgatgccaaaattacgcctgatcggattaactttactcgcacttagcgcgactgccgtctcacacgctgaagaaacgcgctatgtttctgacgaactgaatacctgggtccgtagcggtccgggagatcattatcgcctcgtgggcacggttaacgccggcgaggaagtgaccttattacaaactgacgccaacaccaattatgcccaggtgaaagacagctctggtcgtactgcctggatcccgttgaaacaacttagcacggagccaagcctgcgttcccgtgtgccagatctggaaaatcaggtcaaaacgctgaccgataaactcaccaatatcgataacacctggaatcagcgcaccgcagaaatgcagcaaaaagtggcgcagagtgacagcgtgatcaacgggttaaaagaagaaaatcagaaactgaaaaacgagctgattgtcgcgcagaaaaaggtcgatgccgccagcgtacagctggatgacaaacagcgcaccatcatcatgcagtggtttatgtatggcggtggcgtgctggggcttggcttgctgctcggtctggtactgccgcacctgatcccaagccgcaaacgcaaagatcgctggatgaactaaatcgccttcttcgttgcactgtcttattattaggaattgtgtatttgacgaagggatgatggcgtgaagatttatctggtcggtggtgctgttcgggatgcattgttagggctaccggtcaaagacagagattgggtggtggtcggcagtacgccacaggagatgctcgacgcgggctaccagcaggtaggccgcgattttcctgtgtttctgcatccgcaaacgcatgaagagtatgcgctggcacgtaccgaacggaaatccggttccggttacaccggttttacctgctatgccgcaccggatgtcacgctggaagatgatcttaagcgtcgcgatctgaccattaatgcgctggcccaggacgataacggcgagattatcgacccgtacaacggtctgggcgatctgcaaaatcgtctgttgcgccatgtttcccccgcttttggcgaagatccgttacgcgtgttgcgcgtagcgcgttttgctgcgcgttatgcccacctcagtttccgtattgccgatgaaactctggcgctgatgcgcgagatgacccatgcgggtgaactggaacacctgacgcctgaacgggtatggaaagagacggaaaacgccctcaccacccgcaatccccaggtgttcttccaggtactgcgcgattgcggcgcactgcgcgttttattcccggaaattgacgccctgtttggcgttccggcccctgccaggtggcatccggaaatcgacacgggtattcataccttaatgacgctctcaatggcggcgatgctgagtccgcaggtcgatgtccgtttcgcaacgttatgccacgatctcggtaaaggactgacgccgccagaactttggccacgtcatcatggtcatggcccggcgggtgtgaagttagtggaacaactatgccagcgtctgcgcgtgccaaatgaaattctcgatttagccagactggtggctgagtttcacgatctcatccacacctttccaatgctgaacccgaaaaccattgttaaattgtttgattccattgacgcctggcgtaaaccacagcgtgtcgagcaactggcgctgaccagcgaggctgacgtgcgcggcagaaccggttttgaatcagcggactacccgcaaggccgctggttgcgcgaagcctgggaagtggcgcagtcagtgccgacaaaagctgtcgttgaagcaggatttaaaggtgtggagattcgtgaggagctgacccgacggcggattgcggcggtagccagctggaaggaacaacgttgcccaaagcctgattaactttttaaattcagtatattgcagaaatcccttaggtcggataagacgcacaagcgtcatatccgacactatatctcaatcaaaagaacacaacgtacaccgcagccgccacaataaagcgataaatggcgaacgggataaacgaaatgcgcttaatcaattgcaggaaggttttaatcgctatcagcgccaccacaaaagcggtgataaacccaacggcaaacatcgggatatcgccggtagtcaggaagccccagcttttgtagagatcgagcgccgttgcgcccatcatcatcggcaccgccagcaggaacgagaactcggaagcagcgtaacggctcacccccatcagcatcccacctgaaatggtcgccccggaacgggagaaacccggccacagcgccagacactggaaacagccaatcataaacgcctgacgataggtcatatcatcaagacccggcgcacgcggctctttcggcttcaggcattcggcggcaatcagcaacagaccgccaacgaccagtgcatacatgacatttatcgggttaaacaatgatttaatcgtgtcgtggaacaacagccccagtaccaccgccggaatcatccccagcaagatgtggatcagcgttaaacgacctttgctttctccttcgtgctgcaacgggcgaccaaagtggatgccaatcaggccaaacagacgccgccagaacatcactactaccgccagaattgatcctaactggatcacgacttcaaaggttttcgccgtgtcgccctcaaaccccaacaagtgaccgacaataatcatatggcccgtgctggataccggcagaaattctgtcaatccttcgaccacacccaatattgccgctatcagcagcgagtgcatatcgctcatcaataaacccctaaattataaaaatgtaacgcttgtccgaactactgcagtatgaccaggttataatcgtttggtttaacagctgtaaaattaattattttctttcagattattgccacgctcaatgattacgccaacattcgccgcccgcgccactgcgcctggcttgctgagtttgatacgcacccacggcgagttgaagcgtgctaacagcagctccgccacctcttcagccacgcgttccaccagcgcaaaacgcgccccctcgacgtggctgaccaccgtttctgcaatgtcagcgtaactgaggcaatccgccacatcatcacttttcgccgctttacggttatcccacgccatttcgatatcgaacactaacttctgttcgatggtctgttcccagtcgtaaacaccaatagtggtgattaccgaaagttgctctataaatacaatatccatcacgtcctgcctgctttttggctaaccggataccacttccggcgaaatgtgcgtattatccacagattcatcgttgaacacgaattttcaaaacggaacagcttatgagtgcaatcgcgcctggaatgatcctcatcgcgtacctctgcggctccatttccagtgccattctggtttgccgcttgtgtgggttgcccgatccgcgaaccagcggctccggcaatccaggcgcaaccaatgtgttacgtatcggtggcaagggagcagccgtagcagtactgattttcgacgttctgaaaggaatgttgcccgtctggggcgcgtatgaattaggtgtcagccccttctggctaggcttaattgccatcgccgcctgtcttggacacatctggcccgttttcttcggttttaaaggaggaaaaggcgttgctaccgcttttggtgccatcgcaccaattggctgggatctcactggagtaatggcgggaacctggttactgaccgtgctattgagtggttactcgtcgctgggagcgattgtcagtgcactgattgctccgttttatgtctggtggtttaagccacaattcaccttcccggtttcgatgctctcttgcctgatcctgctgcgtcatcatgacaacatccagcgtctgtggcgtcgtcaggagacaaaaatctggacgaaattcaaaagaaagcgcgaaaaggatcccgagtgatttctggtggatctacatgacctgatagccttcgtcgggcttgcccagccgttgctggcaccatgccgccagaaattccacacagacacgtaatttcatgctgcgatagagcggctcccggtaaacagcccagatattggcgctttgtgcatactccggcaatactcgcaccagtttgccactctccagaaacggcaacacatcccactcggaacgcagcataatccctttgccctccagcgcccattgcagcacaatctcgccgctattggaggaaagatgtccgcttaccttcaccgattttttctcctgaccgttccccaactcccatattccgtgggtcatatcgcgctctttggtcaccaggcagtcatgacgacttaattcctgtaaggattgtggctgcggatatttttgcagatactcaggtgctgcgcataatattcttttattttttgtcaaaagatgcgcaatataataatcaggaattgcgtcattaatacgaatatccagatcaatattatcctgcactaaatcaatttgtcgatcgaacaattcaaaatgcacctgtaactcaggataattgcgcatcagttcggtaatagctggcgcaatatggctgcgcccaaaaccaaaactgcaaccaatgcggatcatcccctccgggcgcgttttgatttgcgtgacgtcatcgaccagtcgctgatattgggtgaggatttccagcgcatgttcgtaacaacgctggccactttcagtcagcgccacgccgcgagcggagcggttcagcagagttgttgccagcgtattttcaaggatttggatccgcttggtgacaaatgcaggcgtttgcccaagcgtcgccgctgcagcactaaaactcccgctatggacgatttccaccagtacctgcaagtctttggctaaaggccagctatttagcattgttaaatatccgcagttttgataaacgcagtgtatttcgcaaaacattaccattccctgctctggcgcaatattcgttcttattttcgcgttgattcacgaactgttaattacatattcacggtggcaaaaaatataaaaccacatttttagtggtagtttgtggcggtgaatttttccagacaaatacataaactggagttgccatgatgagcgaaagtaataagcaacaggcagtgaataagttgacggagattgtcgctaactttaccgccatgatttctacccgaatgcctgatgacgtggtggataaactaaaacagctaaaggatgccgaaacatcgtcgatgggaaaaatcatctaccacacgatgttcgataacatgcaaaaagcgatcgacctgaatcgtcctgcctgtcaggacaccggcgaaatcatgttttttgttaaggtcggttcccgtttcccactgcttggcgagctgcaaagcatactcaaacaagccgtggaagaggcaaccgtcaaagcgccactgcgtcacaatgcggtagaaatttttgacgaagtaaacaccggcaaaaataccggcagtggcgtaccgtgggtcacctgggatatcgtccccgacggtgacgatgcggaaatcgaagtttacatggcaggcggcggctgcacgctacctggccgatcgaaagtgttaatgccgtcagaaggctacgaaggcgtagtgaaattcgtcttcgaaaatatctccaccctcgccgtaaacgcctgtccgccggtacttgtgggcgttggcatcgctacctcggtggaaaccgccgcagtgctctcgcgtaaagccattttgcgcccgattggcagccgccatcccaatccaaaagcggcagagctggagctacgcctggaagaaggactcaaccgtctggggattggtccacaagggctgactggcaacagttcagtgatgggcgtgcatatcgaatctgccgctcgccatccgtcaaccatcggcgttgctgtttctaccggctgctgggcgcatcgtcgcggcacactgcgagttcatgccgatctcacctttgaaaatctgtctcatacccggagcgcgttatgaaaaagatcctgacaaccccgatcaaagctgaagatctgcaagatattcgcgtcggcgatgtgatctacctgaccggtacgctggtgacctgccgtgacgtttgtcaccgccgattgatcgaactgaaacgtccgatcccttacgatctcaacggcaaagcgattttccacgctggccccatcgtgcgcaaaaacggcgacaaatgggagatggtgtccgtcggcccgacaaccagtatgcgtatggaaagttttgaacgtgaatttatcgagcagaccggcgtgaaactggtggtcggcaaaggcggaatggggccgctgaccgaagaaggctgccagaaattcaaggcgctgcatgtgattttcccggctggctgtgcggtactggcggcaactcaagtggaagagattgaagaggtacactggacagaactcgggatgccagagtcgctgtgggtctgccgggtcaaagagtttggcccgctgattgtctctatagatacccacggcaacaacctgatagccgaaaacaaaaagctgttcgccgaacgccgcgatcccatcgtagaagagatctgcgagcacgtccactacatcaaataaccctcccagagaggctcgcccctctcctttttctcaggcataacacgatgaaaccttccactgaatggtggcgataccttgcgccgctggcggtcatcgccattattgctctacttccgcttcccgcagggctggagagtcatacctggctctactttgccgtttttactggcgtgatcgttggactgatcctcgaacccgtgccgggtgccgtggtggcgatggtgggtatatccatcatcgccattctttcgccgtggctgctgtttagcccggagcagctcgcccagccaggttttaagttcaccgccaaatccctctcctgggcggtttctggtttttctaattcagttatctggcttattttcgccgcctttatgtttggtacgggctatgaaaaaaccgggcttggacgtcgcatcgctctgattctggtgaaaaaaatggggcatcgcacgctgtttctcggctatgcagtgatgttctccgagctgatactcgcgcctgtaacaccgtccaactcggcgcgtggtgcggggattatctatcccatcatccgtaacctgccaccgctctatcaatcacaaccaaacgacagcagttcgcgcagcattggctcgtacatcatgtggatggggattgttgccgattgcgtgaccagcgccattttcctgacggcgatggctccaaatttgctgttaattggactgatgaaaagcgcatctaacgccacgctgagctggggcgactggttcctcgggatgttgccgctcagtattttactggttctgctggttccctggctggcttacgtgctgtacccgccgatactgaagtctggcgatcaggtgccgcgctgggcagagacggaactgcaggcaatgggcccgctctgttcgcgtgaaaaacggatgctggggctgatggtaggcgcactggtgctgtggatttttggcggtgattatatcgatgccgcgatggtcggttacagcgtggtggcgctgatgctgcttctgcgcattatctgctgggacgacattgtcagtaataaagcggcgtggaacgttttcttctggctggcctcgcttatcaccctcgctaccggactcaacaacaccggttttattagctggtttggcaaactgttagcaggcagcttaagcggttattcgccaacgatagtgatggtggcgttgattgtggtcttttatctgctgcgctacttttttgccagcgccacagcgtatacctccgctctcgcaccgatgatgattgccgccgcgctggcgatgccggaaatcccgctgccggtgttctgcctgatggttggtgcggcaattggtctggggagcattcttacaccatacgccaccggacccagtccgatttactacggtagtggttatctgccaacggtggattactggcgactgggggcaatttttgggctgatattcctcgtgttgctggtgattaccggcttactgtggatgcccatggtgttgctttaagtgaggacggtgccggaaattgctctccggcacctaatagttttacgcggccggtaactctgccagcggccagcgcggacgcacgctaacgccgagatccgccgtcgcgcctgctttaaaccgcaccattccggcataggcgatcatcgcaccgttatcagtgcaaaattccggacgcgcgtagaacacttcgccacgacgctttttcatcatttcagccagcttcgcccgcagtgtgcggttagcactcacgccgcctgccatgaccagtcgcttaaagcccgtctgatccagtgctcgcttacacttaatcatcaacgtatcgaccactgcatcttcaaaggcgcgggcgatatcggcacgcgtctgatcgtcagtgccgttgtcacgtatggtatttgccgcgaaggttttcagaccagaaaagctgaaatccagccccggacggtcggtcatcgggcgcgggaagacaaagcgcccggcagtaccctgagccgccattttcgacagtaatggcccgccaggataatccagccccagcagcttcgcggttttatcaaacgcttcaccagccgcatcatcgatagactctccgagcagctcgtactgaccaatgccagtcacgctgattaactgcgtatgaccgccggaaaccagcagcgcgacaaacggaaattccggtgggttatcttccagcatcggcgctaacagatgtccttccatatgatgtaccgggattgccggaacgtcccaggcaaacgccagagaacgccccacggtcgcgccaaccagcagtgcgccgactaatcctgggcctgcggtataggccacagcatcaatgtcttttgccgttaaaccagactcctttagcgcctcctggatcaacggtacggttttacgcacgtgatcgcgggaggccagttcaggcacgacgccgccgtagtcagcgtgcaatttcacctgactatacaattggttggctaacaaacctttttcatcgtcgtaaatggcgatgccggtttcatcgcaggaagtttcaatacccagtacacgcatgacttgttttacctcgctttattaccgcgcagtgtaggaccaatgcgggttgatgtaaaactttgttcgcccctggagaaagcctcgtgtatactcctcacccttataaaagtccctttcaaaaaaggccgcggtgctttacaaagcagcagcaattgcagtaaaattccgcaccattttgaaataagctggcgttgatgccagcggcaaaccgaattaatcaaaggtgagaggcacatgccggtaattaaagtacgtgaaaacgagccgttcgacgtagctctgcgtcgcttcaagcgttcctgcgaaaaagcaggtgttctggcggaagttcgtcgtcgtgagttctatgaaaaaccgactaccgaacgtaagcgcgctaaagcttctgcagtgaaacgtcacgcgaagaaactggctcgcgaaaacgcacgccgcactcgtctgtactaattccccgagagcgttgctctccgatcagaccgagttgtagttgtaaggccgtgcttccgaaaggaatgcgcggcttattttcgtttatgaattgctaaaaatcggggcctatggctggacgaatcccacgcgtattcattaatgatctgctggcacgcactgacatcgtcgatctgatcgatgcccgtgtgaagctgaaaaagcagggcaagaatttccacgcgtgttgtccattccacaacgagaaaaccccgtcattcaccgttaacggtgagaaacagttttaccactgctttggatgtggcgcgcatggcaacgcgatcgacttcctgatgaactacgacaagctcgagttcgtcgaaacggtcgaagagctggcagcaatgcacaatcttgaagtgccatttgaagcaggcagcggccccagccagatcgaacgccatcagcggcaaacgctttatcagttgatggacggtctgaatacgttttaccaacaatctttacaacaacctgttgccacgtctgcgcgccagtatctggaaaaacgcggattaagccacgaggttatcgcccgctttgcgattggttttgcgccccccggctgggacaacgtcctgaagcggtttggcggcaatccagaaaatcgccagtcattggttgatgcgggcatgttggtcactaacgatcagggtcgcagttacgatcgtttccgcgagcgggtgatgttccccattcgtgataaacgcggtcgggtgattggttttggcggacgcgtgctgggcaacgatacccccaaatacctgaactcgccggaaacggacattttccataaaggccgccagctttacggtctttatgaagcgcagcaggataacgctgaacccaatcgtctgcttgtggtcgaaggctatatggacgtggtggcgctggcgcaatacggcattaattacgccgttgcgtcgttaggtacgtcaaccaccgccgatcacatacaactgttgttccgcgcgaccaacaatgtcatttgctgttatgacggcgaccgtgcaggccgcgatgccgcctggcgagcgctggaaacggcgctgccttacatgacagacggtcgtcagctacgctttatgtttttgcctgatggcgaagaccctgacacgctggtacgaaaagaaggtaaagaagcgtttgaagcgcggatggagcaggcgatgccactctccgcatttctgtttaacagtctgatgccgcaagttgatctgagtacccctgacgggcgcgcacgtttgagtacgctggcactgccactgatatcgcaagtgccgggcgaaacgctgcgaatatatctacgtcaggaattaggcaacaaattaggcatacttgatgacagccagcttgaacgattaatgccaaaagcggcagagagcggcgtttctcgccctgttccgcagctaaaacgcacgaccatgcgtatacttatagggttgctggtgcaaaatccagaattagcgacgttggtcccgccgcttgagaatctggatgaaaataagctccctggacttggcttattcagagaactggtcaacacttgtctctcccagccaggtctgaccaccgggcaacttttagagcactatcgtggtacaaataatgctgccacccttgaaaaactgtcgatgtgggacgatatagcagataagaatattgctgagcaaaccttcaccgactcactcaaccatatgtttgattcgctgcttgaactgcgccaggaagagttaatcgctcgtgagcgcacgcatggtttaagcaacgaagaacgcctggagctctggacattaaaccaggagctggcgaaaaagtgatttaacggcttaagtgccgaagagcgatcgggaagcccccgacagccgcactgagaggcagcggcaaatatataagtacgccctcgtaattatcgttggcggtaaacaaccgttggatttcagcgttaacagctgaaggacatcgggtcaatcgcccaacaccaacctcatgaaataagtgtggataccgtcttatggagcaaaacccgcagtcacagctgaaacttcttgtcacccgtggtaaggagcaaggctatctgacctatgccgaggtcaatgaccatctgccggaagatatcgtcgattcagatcagatcgaagacatcatccaaatgatcaacgacatgggcattcaggtgatggaagaagcaccggatgccgatgatctgatgctggctgaaaacaccgcggacgaagatgctgccgaagccgccgcgcaggtgctttccagcgtggaatctgaaatcgggcgcacgactgacccggtacgcatgtacatgcgtgaaatgggcaccgttgaactgttgacccgcgaaggcgaaattgacatcgctaagcgtattgaagacgggatcaaccaggttcaatgctccgttgctgaatatccggaagcgatcacctatctgctggaacagtacgatcgtgttgaagcagaagaagcgcgtctgtccgatctgatcaccggctttgttgacccgaacgcagaagaagatttggcacctaccgccactcacgtcggttctgagctttcccaggaagatctggacgatgacgaagatgaagacgaagaagatggtgacgacgataccgccgatgatgacaacagcatcgacccggaactggctcgcgaaaaatttgcggaactgcgcgctcagtacattgtaacgcgtgacaccatcaaagcgaaaggccgcagtcacgctgccgctcaggaagagatcctgaaactgtctgaagtattcaaacagttccgcctggtgccgaagcagtttgactacctggtcaacagcatgcgcgtcatgatggaccgcgttcgtacgcaagaacgtctgatcatgaagctctgcgttgagcagtgcaaaatgccgaagaaaaacttcattaccctgtttaccggcaacgaaaccagcgatacctggttcaacgcggcaattgcgatgaacaagccgtggtcggaaaaactgcacgatgtctctgaagaagtgcatcgcgccctgcagaaactgcagcagattgaagaagaaaccggcctgaccatcgagcaggttaaagatatcaaccgtccgtatgtccatcggtgaaggcgaaagcccgccgtgcgaagaaagagatggttgaagcgaacttgcgtctggttatttctatcgctaagaaatacaccaaccgtggcttgcagttccttgacctgattcaggaaggtaacatcggtctgatgaaagcggttgataaattcgaataccgccgtggttacaagttctccacctacgcaacctggtggatccgtcaggcgatcacccgttctatcgcggatcaggcgcgcaccatccgtattccggtgcatatgattgagactatcaacaagctcaaccgtatttctcgccagatgctgcaagagatgggccgtgaaccaacgccggaagaactggctgaacgcatgctgatgccggaagacaagatccgcaaagtgctgaagatcgccaaagagccaatctccatggaaacgccgatcggtgatgatgaagattcgcatctgggggatttcatcgaggataccaccctcgagctgccgctggattctgcgaccaccgaaagcctgcgtgcggcaacgcacgacgtgctggctggcctgaccgcgcgtgaagcgaaagttctgcgtatgcgtttcggtatcgatatgaacaccgaccacacgctggaagaagtgggtaaacagttcgacgttacccgcgaacgtatccgtcagatcgaagcgaaggcgctgcgcaaactgcgtcacccgagccgttctgaagtgctgcgtagcttcctggacgattaatcggtaggccggatcaggtgttacgccgcacccggcactagtccctccgcacaaacgccaccttttcggtggcgtttttatcgcccacgcaccaccagcgcctggtccagctcgcgatacgcttcaaccagtttctccagtgaaacgcgacttaaaccgctgggatttggcagcacccaaatctgcgtcgaaccaatggtgagagtttgtttcccccactgtgcaccgcgctggctgaatccctgttcatatgcttgtttgcccagaatcgccaacgcctgcggctgataatcttctattttttcaattagcttacgcccgcctgcgtgcagttcctgctttgacacttcattggcttgcaccgttggacggtctaccagtttggtgacgccacaacgataatccagcagatgctgtgcctcctgcggcttcaactgacggtcggtaaacccggcctgatatatcaccttccagaagcggtttgccggatgagcaaagggaaaacccgttccggcggatgaaagaccagggttgataccgcaaaacacgacccgtaaccctggagccaaaatatcctcaaccatatttactcctttctaacatcaccaggaaaagtataacggattgaaaatacattgtttataaaaacagcaggcgcgcggtaatggctggattgcgacacggagttactttataatccgctaccatggccccttagctcagtggttagagcaggcgactcataatcgcttggtcgctggttcaagtccagcaggggccaccagacatagcaaaggctgacgagaaatcgtcagcctttttctttttatatatcagttactttgcgtgccagtaagccgccgcgcgtacccgctgtgggtcatactgttccgcttcaaagcgacggcttaaattcttaacgactttgccttcgccggttatccagatgaagtaatcatcggcagggatttgcatctgcgccagacgcgcatctaccgcctgctcatcatgtgccagccattcgatattaaaaccatcaaggtgcgcgagataatcctgacaggcgttatcccgcacgctaaccagcgcactaacttgcggtttaacggcaagtttgctcaacgtttccaggcggcggcgcagtgcgggcattccggattcatcgcagacatacagctgatacgcgtaatcctctggcaccaccagcgaaccgcgcggacctgccaccgtaagtttatcgcccggtttcgcctgcatcgcccagccgctggcgaccccaccgtcgtgaataaagaaatcgatcgccagttcatggcgtagttcgtcatacagcggcgtatagtcacgcgacggtgggcgtggtccttccggccagacgatgccctcttccgttaccgttggcggcacaaagtgagtgcctggttgaggaaagaagagcttgctgtgatcgtcaaagccgcgcgatgtaaaaccgtccagcgcctcgccgccaaggacaatgcgctgaaaaccggcgctgatacgctcaacgcgtagcacagtcagttcacggaagcgcagatcattgcgaacgcgctgcgggtagcggggggagttattcattgttatcgccttcatgatggtaatcagatatatctaaataaattccacaaatgataatgattgttaatcatgataaatgcaagtgatttgtagcactgatatatctgtagtctgataagacgcgcaacctcttatcaagcatcattgctcaatgccggatgcggcgtgaacgccttatccggcctacatgttgagtaaacctgcgtttaaaaatcatttttgtacttgcagtaatgcttatatcagatataaattagatatatctaattaagcaaaaggaggctgatatgagccatcatcacgaagggtgttgtaaacatgaaggccagccacgccatgagggctgctgcaaaggtgagaagtcagaacacgagcactgcggacacggtcaccagcatgaacacggtcaatgctgcggtggtcgccacggtcgcggcggcggtcgccacggtcgcggcggcggtcgtcgacaacgtttctttggtcacggtgaattgcgtctggtgattctggatattctctcgcgcgatgacagccacggttacgagttgattaaagcgattgaaaatctgacccaggggaattacaccccaagcccgggcgtcatctacccgacgctggattttctgcaggagcagtcgctgattaccattcgcgaagaggaaggtggtaagaagcagattgcgctgaccgaacaaggcgcgcagtggctggaagaaaaccgcgaacaggtagagatgattgaagaacgcatcaaagcgcgttgcgttggcgctgcgctgcgccagaacccgcaaatgaagcgggcgctggataattttaaagcggtgctggatttacgcgtcaaccagagcgatatcactgatgcacaaataaaaaagatcattgcggtgatcgaccgcgccgcttttgatattacgcaactggattaatcgccgcatccgccagtggcgcggtgcaattgccggatgcgacgcttgacgcgccttatccggcctacacccgctacacaccccgtaggcctgataagatgcgccagcatcgcatcaggcattgtgctccaaccgctggatccggcataccgattaatgcagcaccgtcaccgcgtcttccagtcggctggcgcggtgtttcaccatcgccgacacctgcgcactctcttccaccaactcggcgtttttctgggtgatcaggttaagctcatccactgcacgggtcaggctggaaagcccatcggcctgttccagcgttgaatggctaatctgagctatcaactgggtgacgttttttacctgcgccacaatatcttccatcgtccgtccggcggcgtgtacctgctgcgaaccagattgcaccttatcagcactggcatcaatcagcttgcgaatatcgttggcagcattggcgctgcggctggctaaatgacgcacttcccccgccaccactgcaaaacctttgccctgttcgccggcacgcgccgcttccaccgccgcattcagggccagaatattggtctgaaacgcaatatcgttaatcagcgaagtaatggtgccaatgcgctgggtactgtcggcaatatcgtccattgtcttgatcaccgtagtcatcgcctccccgccctgcactgccgcattactggcggtgatagaaagtttatcggcagccgacgccgtggcagagttctgtttcaccgacgccgccatttggttcatggtcgccaccgtttgctgaacgttatcaactgtctgctgggtatgttcgttcagttcatcggtgcctttcgccagcgtctcactgccgtttctgacactggacacctggcttgagacatcattaattagccaacggcacatcaggccaagctgccctaccgcacgtaatgtcagccccagctcatcgctgcgcttcagatgctcaacactattacgctctccggtcgccaccttcagtgcctgacgggcgacattttctatcgggcggacaatctgccattcaaaacaagcgcttgccaacaataccactaatgcacagaggatatacgtcaccaccggggcagcaacaaaccagagcatggccgccagcaagataaacatcagggtcatcactccacgcgcccgccagcgaagcggtaatgaaggcagttttcccaaccaacctttacgcaccaccaggcctttatgaatacgcttactggtccgtccggcgttcaacgctttgtacagcggctccaccgccgcgatctcttcatccgtcgcccgggtacgaatcgacatatagccactgatttttccctcgcgcaccatcggtaccgcattggcccgcacccaataatggtcgccatttttgcggcgatttttcacgatgccgctccagggctccccttttttcagggtgaaccacatatccgcaaacgccgcttttggcatatccgggtgacgcaccatgttgtgcggttgcccctgtaactcctgcaaggtatagccgctcacctgcacaaaagtgtcattagcatgagtgatatagctttgcagatcggtagtggacatcagagtggtgtcgtccgccagcggggtattttgctgggtgacatacggatgagaagacatgttcgcgtcctgtgcaggttatatggttgttaacttcttgtcagagtttatgtcggccccgctgcggttatctttaaccaattaatttgatttagatcgcaatttgcgactaaagcacaaatctaattccttgatttaaaatactttcactctgttactatacgaaaacgttaattaccttgcccaaaaatcaggcaattattgccctgaaagcgtgcatttgcgcagcaatcatcaaatccatacccgacaaaaaccgtgcaaaataacagcaaatgttagcaaatagcattaaatattgcgcaaatgataaccacatttgtgtttatcccgattttcgcgatcgcagccggagtggcgcaatccctgcaatacttaaatcggtatcatgtgatacgcgagcctccggagcatattttgaacaggttaccttcgagcgcatcagctttagcgtgcagcgcccacgccctgaatctcattgaaaagcgaacgttggatcatgaggagatgaaagcacttaaccgggaggtgattgaatacttcaaagagcatgtcaatccggggtttttagagtatcgcaaatctgttaccgccggcggggattacggagccgtagagtggcaagcgggaggtttaaatacgcttgtcgacacccagggacaggagtttatcgactgcctgggaggttttggaattttcaacgtggggcaccgtaatccagttgtggtttccgccgtacagaatcaacttgcgaaacaaccgcttcacagccaggagctgcttgatccgttacgggcgatgctggcgaaaacccttgcggcgctaacgcccggtaaactgaaatacagcttcttctgtaatagcggcaccgaatccgttgaagcggcgctgaagctggcgaaggcttatcagtcaccgcgcggcaagtttacttttattgccaccagcggcgcgttccacggtaaatcacttggcgcgctgtcggccacggcgaaatcgaccttccgcaaaccttttatgccactgctgccagggtttcgtcatgtaccgtttggcaatatcgaagccatgctcacggctcttaacgagtgcaaaaaaaccggtgatgatgttgctgcggtgatcctcgaaccgattcagggcgaaggtggcgtaattctgccgccgccaggctatctcaccgccgtgcgtaagctgtgcgatgagttcggcgcactgatgatcctcgatgaagtacaaacgggcatggggcgcacgggcaagatgttcgcctgcgagcatgagaacgtacagccggatatcctctgccttgccaaagcgctcggcggtggcgtgatgccgattggcgcaactatcgccactgaagaggtgttctcagtcctgttcgacaatccgttcctgcataccaccacctttggcggcaacccgctggcctgtgcggcggcgctggcgaccatcaatgtgttgctggagcagaacttaccggctcaggctgaacaaaaaggcgatatgttgctggacggtttccgtcaactggcgcgggaatatcccgatctggtacaggaagcgcgtggtaaagggatgttgatggcgattgagtttgttgataacgaaatcggctataactttgccagcgagatgttccgccagcgcgtactggtggccggaacactcaacaacgctaaaacgatccgcattgaaccgccactgacactgaccattgaacagtgtgaactggtgatcaaagcggcgcgtaaggcgctggcggccatgcgagtaagtgtcgaagaagcgtaatatcaaatcggatggcgattcgacgtcgccatccgattgttttatacgatacgaacgcccgcaggcatcatccgctccggcgttaacaacacgctttcactgccgtcatcggtttccgcacacagcagcatgcattccgacgtttcaccgcgcattttcgctttttgcagattgcataagaccaccaccgttttccccatcagctcttcttcgctgtagtacggcaccaggctggtcacggtttgcagtgttttttcccccacatcaacctgtacgatgtacagcttgtcggcgttttcatggcgtttcacttccacaatctttccgacgcgcatttccagacgtgcaaaatcagcgtaagccacggtttccattgtttcctccctttgggtaaaattttactaaactatagcaaaagtttttctcaatcctgtaggctaaaaatggagaatgcaggcgtgatcacattcgtgagccgctgtgttaccgttacagcgtcaaagaaacgcgctttatttactgaaaacaggtgacccgataagcacttcctctacaatgggggcgcacatcagggaaagtaaaaaaggtaaacatggcaacactaaaagacatcgcaatcgaagctggcgtatccctggcgacagtatccagggtcttaaatgacgatccaacattgaatgtgaaagaagagacgaaacatcgcattctggagatcgccgaaaagctggagtacaagaccagtagcgcccgtaaactccagacaggtgcagtcaaccaacatcatattctggctatctacagctaccagcaggagctggagatcaacgatccttactatctggcgatccgccacggcattgaaactcagtgcgaaaagctggcgatcgaactgaccaactgttatgaacacaacggtttaccagacattaaaaacgtcaccggtattttaattgtcggcaaacccacgcccgccctgcgcgccgccgcctgtgcgttgaccgacaatatctgttttatcgactttcacgaacccggcagcggttacgatgcggtggatatcgatctggcacgtatcagtaaagaaatcatcgatttctatatcaatcagggcgttaatcgtattggttttattggcggtgaagacttacccggcaaggcggatattcgtgaggtcgcctttgcggaatatggtcgtctgaaacacgtggtacgcgaagaggatatctggcgcggcggtttttccagttcgtcgggctatgaactggcaaaacagatgctggcgcaggaagactatccgaaggcactgtttgttgcttccgattccattgctatcggcgtactgcgggcaattcatgaacgtggcctgaacatcccacaggatatttcgcttatcagcgttaacgatatccccaccgcgcgatttacctttccgccgctctccaccgtgcgcatccattccgagatgatgggaagtcagggcgttaacctggtgtatgaaaaagcccgcgatggtcgcgcgctgccgctgttggtcttcgttcccagcaaattaaaactgcgcggcacgacccgttaaatccccttgcacgctgtccagcaatcgtttttgccggacagtgctgccgtttattttcgtgatccagttaaagtaaatgcatttactcgctactttttagtaaaatttttactaaactccccagcaattacacaaactaccatcaccatgaatggttccgatttctctctaccgggaggccctatgaatcgctgggaaaacattcagctcacccacgaaaaccgacttgcgccgcgtgcgtactttttttcatatgattctgttgcgcaggctcgtacttttgcccgtgaaaccagcagcctgtttctgcccttaagcggtcagtggaatttccacttttttgaccatccgctgcaagtgccagaagccttcacctctgagttaatggctgactgggggcatattaccgtccccgccatgtggcaaatggaaggtcacggcaaactgcaatataccgacgaaggttttccgttccccatcgatgtgccgtttgtccccagcgataacccaaccggtgcctatcaacgtattttcaccctcagcgacggctggcagggtaaacagacgctgattaaatttgacggcgtcgaaacctattttgaagtctacgttaacggtcagtatgtggggttcagcaagggcagtcgcctgaccgcagagtttgacatcagcgcgatggttaaaaccggcgacaacctgttgtgtgtgcgcgtgatgcaatgggcggactctacctacgtggaagaccaggatatgtggtggtcggcggggatcttccgcgatgtttatctgatcggaaaacaactcacgcacattaacgatttcaccgtgcgcaccgactttgacgaagcctattgcgatgccacactttcctgcgaagtggtgctggaaaatctcgccgcctcccctgtcgtcacgacgctggaatataccctgtttgatggcgaacacgtggtgcacagcagcgccattgatcatttggcaattgaaaaactgaccagcgcccgctttgcttttactgtcgaacagccgcagcaatggtcagcagaatccccttatctttaccatctggtcatgacgctgaaagacgccgacggcaacgttctggaagtggtgccacaacgcgttggcttccgtgatatcaaagtgcgcgacggtctgttctggatcaataaccgttatgtgatgctgcacggcgtcaaccgccacgacaacgatcatcgcaaaggccgcgccgttgggatggatcgcgtcgagaaagatctccagttgatgaagcagcacaacatcaactccgtgcgtaccgctcactacccgaacgatccacgtttttacgaactgtgcgatatctacggcctgtttgtgatggcggaaaccgacgtcgaatcgcacggctttgctaatgtcggcgatatcagccgtattaccgacgatccgcagtgggaaaacgtctacgtcgagcgcattgttcgccatattcacgcgcagaaaaaccatccgtcgatcatcatctggtcgctgggcaatgaatccggctatggctgtaacatccgcgcgatgtaccatgcggcgaaggcgctggatgacacgcgactggtgcattacgaagaagatcgcgatgctgaagtggtcgatattatttccaccatgtacacccgcgtgccgctgatgaatgagtttggtgaatacccgcatccgaagccgcgcatcatctgtgaatatgctcatgcgatggggaacggaccgggcgggctgacggagtaccagaacgtcttctataagcacgattgcattcagggacattatgtctgggaatggtgcgaccacgggatccaggcgcaggatgacaacggcaacgtctggtacaaattcggcggcgactacggcgactatcccaacaactataacttctgtcttgatggtttgatctattccgatcagacgccgggaccaggcctgaaagagtacaaacaggttattgcgccggtaaaaatccacgcgctggatctgactcgcggcgagttgaaagtcgaaaataaactgtggtttaccacgctagatgactacaccctgcacgcagaggtgcgcgccgaaggtgaaacgctcgcgacgcaacagattaaactgcgcgacgttgcgccgaacagcgaagcccccttacagatcacgctgccgcagctggacgcccgcgaagcgttcctcaacattacggtgaccaaagattcccgcacccgctacagcgaagccgggcattctatcgccacttatcagttcccgctgaaggaaaacaccgcgcagcctgtacctttcgcaccgaataacgcccgtccgctgacgctggaagacgatcgtttgagctgtactgttcgcggctacaactttgcgatcaccttctcaaaaacgagtggtaaaccgacatcctggcaagtgaatggcgagtcgctgctgacccgcgagccaaagatcaacttcttcaagccgatgatcgacaaccataagcaggagtacgaagggctgtggcagccaaatcatttgcagatcatgcaggagcatctgcgcgattttgtcgttgagcaaagtgatgatgaagtgttgctagtcagccgcacggttattgccccaccggtgtttgacttcgggatgcgctgcacctacatctggcgcatcgctgccgatggccaggttaacgtggcgctttccggcgaacgttatggcgactatccgcacatcattccgtgcatcggtttcaccatgggaattaacggcgaatacgaccaggtggcgtattacggacgtggaccgggcgaaaactacgccgacagccagcaggctaacatcatcgatatctggcgcagcaccgtcgatgccatgttcgagaactatcccttcccgcagaacaacggtaaccgtcagcatgtccgctggacggcactgactaaccgccacggcaacggtctgctggtggttccgcagcgaccaattaacttcagcgcctggcactatacccaggaaaacatccacgctgcccagcactgtaacgagctgcagcgcagtgatgacatcactctgaatctcgaccaccagctgcttggcctcggctccaactcctggggcagcgaggtgctggactcctggcgcgtctggttccgtgacttcagctacggctttacgttgctgccggtttctggcggagaagctaccgcgcaaagcctggcgtcgtatgagttcggcgcagggttcttttccacgaatttgcacagcgagaataagcaatgaggatcatcgataacttagaacagttccgccagatttatgcctctggcaagaagtggcaacgatgcgttgaagcgattgaaaatatcgacaacattcagcctggcgtcgcccactccatcggtgactcattgacttaccgcgtggagacagactccgcgaccgatgcgctatttaccgggcatcgacgctattttgaagtgcattactacctgcaagggcagcaaaaaattgaatatgcgccgaaagagacattacaggtagtggaatattatcgtgatgaaactgaccgtgaatatttaaaaggctgcggagaaaccgtagaggtccacgaagggcaaatcgttatttgcgatatccatgaagcgtatcggtttatctgcaataacgcggtcaaaaaagtggttctcaaagtcaccatcgaagatggttatttccataacaaataacaactacggcggcaaaaggagtttgccgccaccgctaccctactcattttcggagatgtgttatgtctgataccaaacgtaatacaatcggcaaattcggcttgctctcgctgacttttgccgccgtttacagctttaacaacgttatcaataataatattgagcttggactggcctcggcaccgatgtttttcctcgcaacaattttttattttattcccttctgtctgatcatcgcagaatttgtttcgttaaataaaaactcagaagccggtgtctacgcgtgggtaaaaagttcgctgggcggacgttgggcatttattactgcctatacctactggttcgtaaacctgttctttttcacctcgttgttgccgcgcgttattgcttatgcttcgtatgccttcctcggctacgaatatattatgacgccggttgccaccaccattatcagtatggtgctgttcgccttctccacctgggtttccaccaacggggcgaaaatgctggggccaatcacctccgtcacttcaacgctgatgctgctgttaacgctctcctacattttactggcaggtacggcactggttggcggcgtacagcctgccgatccgatcaccgttgacgcgatgatcccgaacttcaactgggcgttcctcggcgtgaccacctggatctttatggccgcaggtggcgcggagtccgtcgctgtgtacgttaacgacgtcaaaggcggttcgaaatcgttcgttaaagtgatcatcctcgccgggatttttatcggcgtactgtattccgtctcctcggtgctgattaacgtcttcgtcagcagcaaagagttgaaatttactggcggatcggtacaggtattccacggcatggcggcgtattttggtctaccggaagcactgatgaatcgctttgtcggtctggtgtcctttaccgcgatgttcggttccctgctgatgtggacggcaacgccggtgaaaattttcttctccgaaattccggaaggcatctttggtaagaaaaccgtcgaactgaacgaaaacggcgttccggcgcgcgcagcgtggatccagttcctgatcgtcatcccgctgatgattatcccgatgctcggttccaataccgtgcaggatctgatgaataccattattaatatgaccgccgcagcgtccatgcttccgccgttattcatcatgctggcttacctgaatttacgcgccaaattagatcacctgccacgcgatttccgtatgggctcccgccgcaccggtattatcgttgtttcaatgctgattgcgatatttgccgtagggtttgtcgcttcgacattcccgactggcgcgaatattctgaccatcattttttataacgtcggcggtattgttatcttcctcggctttgcgtggtggaaatacagtaaatatataaagggattaacggctgaagagcgccatattgaggcgacaccagccagcaatgttgattaagcagaataataaaaaatgagcaggcattttccctcttcctggatggggagagggaaaatagtttctgcctttatatttttataattacaacgataaaaggctgtactttttctttagctcatggattaacataatgaaattaatcactgcaccatgcagagcattacttgcgctgccgttttgctacgccttttctgtgaccgctgatgaagcacgtccggcagaacatgacgacacaaaaacccccgcaatgacctcgacatcttctccttcatttcgtttttacggcgaattaggggttggtgggtatatggatttagagggtgagaataaacataaatacagcgacggcacctatattgaaggtggcctggagatgaagtacggctcctggttcggcctgatttacggcgaaggctggaccgtgcaggccgaccacgacggtaatgcctgggtgcctgaccatagctggggtggtttcgaaggtgggattaaccgtttctatggcggttatcgtaccaatgatggcaccgaaatcatgctcagtctgcgtcaggattcctcgctggatgacctgcaatggtggggcgatttcacgcccgatctgggctacgtcattcccaatacccgcgacattatgactgcgctgaaggtacagaacttaagcggcaactttcgttatagcgttaccgccacacctgccggacatcatgacgaaagcaaagcctggctacattttggcaagtacgatcgctacgacgacaaatacacctatccggcaatgatgaacggttacatccagtatgaccttgcagaaggtatcacctggatgaacggtctggaaatcaccgacggcacaggccaactctatctcacgggcctgcttacccctaactttgccgctcgcgcctggcaccataccggacgcgccgacgggctggacgtatcgggaagtgaaagcgggatgatggtgagcgccatgtatgaagcgttaaagggcgtttatctctccaccgcttacacctacgccaaacatcgccctgaccacgctgacgatgaaaccacctctttcatgcagtttggtatctggtacgaatacggcggcggacgtttcgcaacggcttttgatagccgcttctacatgaaaaatgcctctcacgatcccagcgaccaactcttcctgatgcaatatttttactggtaataaggacagtaatctcatgaaaataaaaaccattttaacgccagtagcctgtgctctgctgatgagcttttccgcccatgccgctaacgctgacaattataaaaacgtgattaaccgtactggcgcgccgcagtacatgaaggattacgattacgacgatcaccagcgttttaatccgtttttcgatctcggagcctggcatggtcatctgttgccagacggcccgaacactatgggcggctttcctggcgttgcgctgctgacggaagaatacatcaactttatggccagcaatttcgatcgcctgaccgtctggcaagacggcaagaaagtcgatttcacgctggaggcatacagtattcccggcgcgctggtgcaaaagttgatatcgaaagatgtacaggtcgaaatgattctgcgcttcgccacgccgcgcacatcactactggaaaccaaaatcaccagcgataaaccgctggatctggtgtgggatggtgaactgctggaaaaactggaagcgaaagaagggaaaccgctttccgataaaaccattgctggcgagtaccctgactatcagcgcaaaatcagcgccacccgtgatggcctgaaagtcacctttggcaaagtgcgcgccacctgggatctgctgacctccggtgaatcagaatatcaggtgcataaatccctgccagtgcagactgaaatcaacggcaatcgctttaccagtaaggcgcatatcaacagttcgacgacgctctataccacctactcccatctgctgaccgctcaggaagttagcaaagagcaaatgcagatccgcgatattctggcgcgtccggcgttttatctcaccgcctcgcagcaacgctgggaagagtatctgaagaaagggttaaccaatccggatgcgacgccggaacagacgcgcgtcgcggtgaaagccatcgaaacgctcaacggtaactggcgatcgccgggcggtgcggtgaaatataacaccgtcacgccgtcggtgaccgggcgctggttctccggcaatcagacctggccgtgggatacctggaagcaggcgtttgcgatggcgcatttcaatccggatatcgccaaagagaatatccgcgcggtcttctcctggcagatccagccaggcgacagcgtgcgtccgcaggatgtgggctttgtccccgacctgatagcgtggaaccttagccccgagcgtggcggcgatggcggcaactggaacgaacgtaacaccaaacccagccttgccgcctggtcggtgatggaagtgtacaacgtcacccaggataaaacctggctggcagagatgtacccgaaactggtggcctatcacgactggtggctacgtaaccgcgatcacaacggcaacggcgtaccggaatatggcgcaacccgcgataaagcccacaatactgataatggcgagatgctgtttacagtgaaaaaaggcaataaagaagagacgcagtctgggctgaacaactacgcccgcgtggtggagaaaggccagtacgacagtctggaaattccggcacaggttgcggcgtcgtgggaatcggggcgtgatgatgccgccgtctttgggtttatcgacaaagaacagttggataaatatgtcgctaacggcggcaaacgtagcgactggacggtgaaattcgccgagaaccgcagtcaggacggaacgttgctgggctactcgctattgcaggagtcggtggatcaggccagctatatgtacagcgataaccattatctggcggagatggcgacgattctcggtaagccggaagaggccaaacgctatcgtcagttagcacaacagctcgcggactacatcaacacttgtatgttcgacccgactacacagttctactatgacgtgcgtattgaagataaaccgctggcgaacggctgcgcgggcaaaccgattgtcgagcgcggtaaagggccggaaggctggtcaccgctgtttaacggtgcggcaacgcaggccaacgccgacgcggtggtgaaggtgatgctggatccgaaagaattcaacacctttgtcccgctggggacggcagcgttaaccaacccagcctttggcgcagatatctactggcgcgggcgcgtatgggtggatcagttctggtttggtctgaaagggatggagcgttacggttatcgcgatgacgccctgaaactggctgatacgttcttccggcacgccaaaggattaaccgccgatggcccaattcaggagaattacaacccgctcactggcgcgcagcaaggcgcaccaaatttctcctggagtgccgcgcatttgtatatgttgtataacgatttttttcgtaagcagtaattagcaacggctggcggatgcggcgtaaacgccttatccgccctacatgtgcaatcccccaggccggataagacgcgtcaagcgtcgcatccggcgttaccaccgggcgtattctttttgaatcccatcacaaaccccgcactccccttttcccttttctccggcgacggctaaattagaactcatccgaccacataacaattattttacatactggacaattttatgagctacccgtcgctgttcgccccgctggatttaggttttaccacgttaaaaaaccgcgtgttgatgggttcaatgcacaccgggctggaggaatacccggacggcgctgaacggctggcagcgttttatgccgaacgcgcccgtcacggcgtggcgttgattgtcagcggcggtatcgcaccagatttaacaggcgttggcatggaaggcggtgcaatgctcaatgacgccagccagatcccacaccatcgcaccattaccgaagccgtacatcaggaaggcggcaaaatcgccctgcaaattttgcataccgggcgctacagctaccaaccgcatctggtcgctccctccgcattgcaggcccccatcaaccgtttcgttcctcacgaactcacccatgaagagatcctgcaactgatcgacgatttcgcccactgcgcgcaattggcacgggaggcaggatacgacggtgtagaggtgatggggtccgaagggtatttgatcaacgaatttctgacgctgcgcaccaatcagcgtagtgaccagtggggcggcgattaccgcaaccggatgcggtttgccgtagaagtagtgcgtgcggtgcgcgaacgtgtcggcaacgacttcattattatctaccgactgtcgatgctcgacctggtcgaaggcggcggtacttttgccgaaatggtagagctggcgcaggccattgaagcggcgggcgcgaccattatcaacaccggcattggctggcatgaagcacgtattccgaccattgccacgcccgtgccgcgcggtgcctttagctgggtcacgcgcaaactgaaaggccacgtttcgctgccgctggtgaccaccaaccggattaacgatccgcaggttgccgacgatattctctcgcgcggcgatgccgatatggtatcgatggcgcgaccgtttcttgctgatgcggaactgctgtcaaaagcgcaatcgggacgagccgatgagatcaacacttgtattggctgcaaccaggcctgtctcgatcagatcttcgttggcaaagtcacctcgtgcctggtgaatcctcgcgcctgccatgaaaccaaaatgccaatccttcctgccgtgcagaaaaaaaatctggcggtggtcggtgcgggacctgctgggctggcgtttgccattaacgcggcggcgcgtgggcatcaggtaacattgtttgatgcgcacagcgagatcggcgggcagtttaatatcgccaaacagatccccggcaaagaggagttttacgaaacgcagcgctattaccgccggatgatcgaagtgacgggtgtgacgctaaaactcaatcacaccgtgacagcggatcagttacaggcgttcgatgaaacgatcctcgccagtgggatcgtgccgcgcgttccgcctatcgacgggatcgatcatccgaatgtattgagttatctcgatgtactgcgcgacaaagcgccggtgggcaacaaagttgccatcatcggttgtggcggaattggttttgatacggcgatgtatttaagtcagccgggcgaatccaccagccagaatatcgccgggttctgtaatgagtggggaatcgacagtagcctgcaacaggccggaggtttgagtccgcaaggcatgcagatcccccgtagcccacggcagattgtgatgctccagcgcaaagccagcaaaccaggacaagggttaggcaaaaccaccggctggatccatcgcaccaccctgctctcacgcggcgtgaaaatgatcccaggcgtaagttaccagaagatcgacgatgacgggctgcatgtagtgatcaacggcgaaacgcaggtattagcagtggacaatgtggtgatctgcgcggggcaggagccaaaccgcgcattggcgcaaccgctgattgatagtgggaaaactgtgcatttaattggcggctgcgatgtagctatggagctggacgcacggcgggcaattgcccagggaacacggctggcgctagagatttaaatcgttgtttgaagcgccggatgcgacgcatccggcacgtcgcgttaatcaataaacaaggcgggagaaatgccgaatcgcgttgccagttttttagcgtgttccagcgttaatttcctcttcccgctcaaaacgcgtgacaccatcgatttactgccaatttccggaagatcggaaagggttaaaccatattgatccataagggtacgaatcacagctataccgccaggcatggcttgcgccatggcattaaattcagcaaattcgggcgctgattcttcccacgcggttattttggcacacaccagatccagcaaggggttttcaggatcgttgagcagcagatgatctaccagttccagcgcctgggtgtattgttcctcgttctgaatacccgccagaaaaggtgccacagcagttagcttttctcctgcttgcaagatgtcggcaatcgcaatcattttttccccttagtacgatgaacggcggtaaagaaatcgtattctttatgcgtcataacttcacgtatgtagcataaacgttgaacaacgctaaacaagagaatgtagaggatggtgacagggattttttgttttatggaagcgcgattccagaactgggcagacattgccggatgcgacgcttgccgcgtcttatccgacctgggggtaatgtgctgaacgtatgccggataaggcgtttacgccgcatccggcaggtaacccccaatcttaccgacgacgccccagcttcactgctttcagcaccacaaatttattattcgtggcgatggtggtgcagttgccgaaaattttcttcagtttatggaagtaatccaggtgacggttggcaacgatatacagctcgccgttgattttcaggcagcggcgggcatggtggaacatctcccaggcgacgttatcggtcagcgcatgttgctgatgaaacggcgggttgcagagcacagcattaaaacggaaaggctccacgccggagagcgcgttgttgatcataaactcgcagcgatccaacgcctcgggcatgttggtttctacgtttaaccggctggaagcaaccgccatcggcgattcatcgacaaacaccactttcgcctgcgggtttttatcgagcaatgtcaggccaataacgccattaccgcaaccgagatcgacaatctcaccttcgagattctctggcagatgttgcataaagaagcgcgcgccaatatccagcccagtgcgggagaaaacattcgcatggttgtggatagtccagtcagtgccttccagcttccagctaacggtctgcggcgcatcggccaacggcggttcgttgaaggtgcagttaatcaggcgcgctttcttccatgccagcgtggtggtggtcgggccgagcactttttcgaacagttccagcgtggaagtgtggatgtcacgggctttggcaccggcaataatacgtgtatccggcgtgaccactttgcgcagcgcgcgcagttgttgttccagcaacgccagtgttttcggtactttgatcagtaccacgcccggctgttgcgggtagtcggcggtgctgtcgagaaacttcacgctcgactcatcaatcccgttgaggcgtaaattctcgcgcgtcgccagttcgctgatgtatgagtcgccaatgctgtatggcttatgttccgccagcgcacaacttaacgcaccaaaggcatcattcaggatcaacaccgggccgcggatttctgtgtcgtccaactgttgcagcaaatattcatccgccgcttcccacgcctgtagtgggtttacgtcatccgtcgccggaaaacgttgtagtgtcagtgaacggaaaccgttgtctaagtggctcatcggccctcctgaatgataaaatttcgacgttgcccctgaaaagggtgcgtgagtataccctttttctctttttcgtgggcggttatgagcaatcttacttatcttcagggttatcccgagcagctactttcccaggtgcgaacgctgataaacgaacagcgtctgggcgatgtgctggcaaaacgctatccgggaacacacgactacgccaccgataaagccctctggcaatatactcaggatcttaaaaatcagtttctgcgcaatgccccgccgatcactaaagtgatgtatgacaacaagatccatgtgctgaaaaatgcgctcgggttacataccgctgtttcgcgtgtgcagggcggcaagctgaaagcaaaggcggagatccgcgtcgctaccgtgtttcgcaacgcgccggaaccgtttttgcgcatgatcgtggtgcacgagttggcgcacctgaaggagaaagagcataacaaagcgttctatcaattgtgctgccatatggagccgcagtaccaccagcttgagttcgacacccggctgtggctaacgcagttgtcgcttgggcaggacaaaatctgaaaatgatgtcaggcgttattttttcctcctttagcgcctaaaatcgacctcctccctttcgttaaggatgacgaccatgctgcgcgcatttgcccgccttcttctccgtatttgtttttctcgccggactcttaaaattggctgtttattgttgcttatagcaggagcaaccctttttattgccgatcgcgttatggtcaacgccagccaacaactgacctggagcgatgtcaacgccgttccggcgcggaacgtgggtttattgctgggggcgaggccgggtaatcgctactttacccgacgtattgataccgcagcagagttgtaccacgccggaaaagtgaaatggctgttagttagtggcgataacggacgtaaaaattacgatgaagcgtcaggaatgcagcaggccttgatcgctaaaggcgtaccagcaaaagtgatcttctgcgactatgccggattctcaacgcttgattcggtggtgcgtgccaaaaaggtgtttggtgaaaaccatatcaccattatctcgcaagaatttcataatcaacgcgccatctggctggcaaagcaatacggcatcgacgctatcggttttaacgcgccagacctcaatatgaagcacggtttttatactcaactgcgggagaaactcgctcgtgtcagcgcggtgattgacgcaaaaatcctccatcgccagccgaaatatctcgggccgttggttatgattgggccgtttagtgagcatggctgtccggcaaaagaataatgcgtatctgcgcacgtcgaagataaaaaaggcgtgctacagtgacgagagaatccctttatggagtatccacgcgttatgatacgtttcgctgtgattggtacgaactggatcactcgccagttcgtcgaggccgcccatgagagcggtaaatacaagttaaccgccgtttattcccgcagtcttgaacaggcccagcacttcgccaatgatttttctgtcgagcatctgtttacgtcgctggaagcgatggcagaaagcgatgccattgacgcggtgtatattgccagcccgaattccctgcacttttcccagacacaacttttccttagtcacaaaattcatgtgatttgcgagaaaccgctggcgtcgaatctggcggaagtggatgccgccattgcctgtgcgcgggaaaatcaggtggtgctgtttgaggcatttaaaacggcctacctgccgaactttcatctgttacgccaggcgctgccgaaagtcggcaaactgcgtaaagtctttttcaactattgccagtattcctcgcggtatcaacgttacctggatggtgagaatcccaacacctttaatccggcattctctaacggttcaattatggatatcggcttttactgtctggcgtcagcggtggcgttatttggtgagccgaaaagcgtgcaggcaaccgccagtttgttggcaagcggcgtagatgcccacggcgtggtggtgatggattacggtgatttcagcgttacgttgcagcactcaaaagtgagcgattctgtcctggcaagcgagattcagggcgaagcgggatcgctggtgattgaaaaactgtctgaatgccagaaagtttgctttgttccgcgtggcagccagatgcaggatctcacccaaccgcagcatattaataccatgctctacgaagcagagctgttcgctaccctggtggatgagcatctggtggatcatccagggctggcggtcagtcgcatcaccgccaaactgctgaccgagatccgccgccagactggggtgatttttccggcagatagcgtaaaactataaattgccaaagtaaaacagtgtaaaaggtatgtaacagaccattgactgactgaatggtctgtcatactttgttacctgcaaaggggagtaacttcattgccggtcgatcgtcattacgatgtgtgaaaaaccacatccggtcaccgggcaacccgaaaggaatacgcagacgtattccttttttgttgtaagtgagaccttgccggaaggcgaggtctatgcataaaaagcagcggctgacgtcttccgacgttggccgtttttttatgtgtaaggaacttctatgaatactgtcggcacgccgttgctatggggcggattcgctgttgttgtcaccattatgctggctatcgacctgttgttgcaggggcgtcgtggggcacatgccatgaccatgaaacaggctgcggcctggtcgctggtctgggtgacgctgtcgttactgtttaacgccgctttctggtggtatctggtgcaaaccgaaggtcgcgccgttgccgatccacaggcactggcctttctcacgggttatctgattgagaaatcgctggcggtcgataacgtctttgtctggctgatgttgttcagctatttctctgttccggcggcattacaacgccgcgtgctggtgtatggcgtactcggggcgattgttctgcgtaccatcatgatcttcactggtagctggctgatttcacagttcgactggatcttgtatatcttcggtgccttcctgctgtttaccggcgtgaagatggcgctcgcccatgaagatgaatcaggcattggcgacaagccgctggtgcgctggctacgcggtcatttgcgcatgaccgacaccatcgacaacgagcatttctttgtgcgtaaaaatggtttgttgtatgccacgccgctgatgctggtgctgattctggtggagttgagcgacgtgattttcgccgtggatagtattccggctatcttcgccgtgaccaccgatccgtttattgtgctgacctcaaacctgtttgcgatcctcggcctgcgtgcgatgtatttcctgctggcaggtgtggcagagcgtttctcgatgctcaaatatggtctggcggtgattctggtgtttatcggtatcaagatgctgattgtcgacttctaccatattccgatcgccgtctcgctgggcgtggtgtttggcattctggtgatgacgtttattatcaacgcctgggtgaattatcggcatgataagcagcgggtagaataatttttaatctgcctaagccgtgtactctgtcatcaacatgagcaccgttttctccctctccccaaaaggggcgaggggactgaccgagtacttttttgacgttgtcatcagtctggaagccgcacgttgggctttattttcatgtcaaacaaatgtaaccattaagttgcgaaatatgacttctctttaaaatccagcatatttcgcttcccgaagctgtaactttccttatactcgaccttgcaaacactttgttacatcctgaaagatgcgtcgacagaacgcaccagggatgtgcgacaacacaatgaaaggatcgaaaaatgactacgcaacattcaccggggctattccggcgtctggctcatggcagcctggtaaaacaaatcctggccggccttattctggggattcttctggcatggatctcaaaacccgcggcggaagctgttggtctgttaggtactttgttcgtcggcgcactgaaagccgttgcccccatcctggtgttgatgctggtaatggcatctattgctaaccaccagcacgggcagaaaaccaatatccgccctattttgttcctctatctgctgggcaccttctctgctgctctagccgcagtaatcttcagttttgccttcccttctaccctgcacttgtccagtagcgcggatgatatttcgccgccgtcaggcattgtagaagtgatgcgcgggctggtaatgagcatggtttccaaccccattgacgcgctgctgaaaggtaactatatcgggatcctggtgtgggcaattggcctcggtttcgcactgcgtcacggtaacgaaaccaccaaaaacctggtcaacgatatgtcgaatgccgttacctttatggtgaaactggtgattcacttcgcaccgatcggtatttttggtctggtttcttctaccctggcaaccaccggtttctccacgctgtggggctacgcgcaactgctggtggtactggttggctgtatgctgctggtggcgctggtggttaacccactgctggtatggtggaaaattcgtcgtaacccgttcccgctggtgctgctgtgcctgcgcgaaagcggcgtgtatgccttcttcacccgcagctctgcggcgaacattccggtgaatatggcgctgtgtgaaaagctgaatctggatcgcgatacctattccgtttctattccgctgggagccaccatcaatatggcgggcgcagcaatcaccattaccgtgttgacgctggctgcggttaatacgctgggtattccggttgatctgcccacagcgctgctgttgagcgtagtggcttctctgtgtgcctgtggcgcatccggcgtggcgggggggtctctgttgctgatcccactggcctgtaatatgttcggtatttcgaacgatatcgccatgcaggtggttgctgtcggctttattatcggcgtattgcaggactcctgtgaaaccgcgctgaactcgtcaactgacgtgctgttcactgcggcagcttgccaggcggaagacgatcgtctggcaaatagcgccctgcgtaactaatacttagcccctttcgtctacggcggaaggggttttctccactttaaacggatcaattccccttctctgcatacgccagaaacgaatgatattcaggccattcatcagcagaaaactgccttcaatcatcgtgccgcctatcgaccccgcccagaagttgtgaatcacccagcaacacgttgaaaaccacattacgcagcgcatggtcagccctttacagcggaacagcgcccaggtactgacaatcgtgccgattaccggcaatagttcgacaggatgatggaacttcgcgaggccaattccgccagtcagcacaataaaaatcgccattacccataagctgcgcgtgcgtaaggtaatcaatgtacgaatggcattaaggatggcactggcaccggcaggataggtgcccagaagaaaaaaatgtacgccaataacggcgctatagaccgaaagttgctttttgaagcgacgttcgtcacgattgaaaaatgttgtgataccaatcagaaaggcgatgacacccacgccctgggccagccaatacgcggtcatgataaatccttagcaggtatggaaaagcaaacggcgcttcacattatgaaacgccgttttttattaacaactcatttcgactttatagcgttacgccgcttttgaagatcgccagttcgcggaagtcgttacgctcgttgcaggtttgcttaccgttggcaaactcaacgatggtgtcgataaattcttccagcaactgcggcatcgctttaccgtggatcagctgacccgcgtcaaagtcgatccagtgttttttcttcgccgccagttcgctgttggtggcgattttcaccgtcggtacaaagccgccgtacggcgtgccgcgaccggtactgaacagcaccatatggcagcccgcacccgccagggcgctggtcgctacggcatcgttacccggcgcacttaacaagttcagccccggcgttttcagacgctcgccgtaacgcagcacgtcaaccacgacactggaacccgctttctgggtacagccaagcgatttatcttccagcgtggtgataccgcctgctttgttccccggtgatgggttttcgtagatcggctggtcatgggcaataaagtactgcttgaagtcattgaccatggtgaccagtttttcaaacgttgcttcgtcgcgacaatggtccatcagcaactgctctgcgccaaacatctccggcacttcggtcagtacggtagtaccgccgttagcaatcacgtagtcagagaaacgccccagcatcgggttagcagtaataccagaaagaccgtcagaaccaccgcactccagaccaaacttcagttcgctgagtttgcccggctcgcgtttatcgttgcgcatcacgctatacagctgatgcaaatgcgcgatcccggcctcgatttcatcatcctgctgttggcagatcatgaaatgaacgcgttcaggatcgatatcgcccaacgtttcacggaatgcggcaacctggttattttcgcaacccagaccaatcaccagcactgcgcccgcgttcgggtggcgcaccatgttttgcagcatggtgcgagtattgatgtgatcgtcgcccagttgtgagcagccgtaggtgtggctgaagaggaacacgccgtcggtaccttcagcgttgttggtctctttcaggaaacgattttggatctgccgcgcgatgccgttgacacagcccacggttggcaggatccacagctcattacgcaccccgacatcgccgttagcgcgacgatagatctgcacttcacgatctgccgcttgcgcaggcagatcctgaaaatcaggttgatagcgatactgatccagatcgctcagattcgtgcgcgtattgtgggcgtgaacgtgttcccccgctgcaatatccgccaatgcataaccaatcggcaggccatatttaatgacgttggccccttttgcgatatccgttaacgcaaatttatgtccacgagcaacatcctggcgcagcgtaacagtctggttatcgacactgacttctgtgccttcagccaaatccgctaaagcaaccgcgacgttatccagcgcatggatcttgatgtattgcatatcaaccccagaccttagttcagttcaatggcgaagtagtcacgcgcattgttaaagcaaatatttttcaccatctcgcccagcaggttgatgtccgccggtgcttcgcctgcttccacccagcgaccgatcatctggcacagaatgcggcggaagtattcgtgacgggtgtatgacaggaagctacggctgtcagtcagcatgccgacaaagcggctcagcagaccgagctgcgccagttgggtcatctgacgttccataccgtctttctggtcgttaaaccaccagccggaaccgaactgcattttgcccggcataccttcgccctggaagttaccgatcatggtgcccagcacttcgttatcgcgcgggttcaggcagtagagaatggttttcggcagcaggttttcttcattctgcttgctcagcagcttagacagctcttccgccatcggacggtcgttgatggagtcaaagccgacatccggccccagcagtttaaactgacgcaggttgttattacgcagtgcgccaatgtggtactgctgtacccagccgcgacgtgcatattcggcaccaaggaacaccagcaccgcagttttgaactgtgccacttcgtgctcgctcagggtttcgcctgccagacggcgcgcgaggatgctgtccagttccgcttcgttcgcttcagcaaacatcaccacatccagcgcgtggtcagacactttacagccgtgagcggcgaagtgatccagacgtttagtcagggcagtttgcaggtcagcaaagcggcgaatgtcggtatcggaaacttcgcccagcttcgccatgtagtcgttaaaggtcgcctgttcaatgttaaaggctttgtccggacgccagctcggcagcactttaatggtgaaagagccgtctttggcgatctctgcgtgatgctccagagaatcgatcgggtcatcggtggtgccgaccattttcacgttcatctgctgcatgatgccgcgtgcagagaaattatcctgcgccagcagttcgttacattcgttccagatttcatcggcagttgacggagaaagcaatttgccagtgataccaaacggacgacgcagttcgaggtgcgtccagtggtataacgggttgccgatagtgtgcggaacagtcgccgcccaggcgtcaaatttttcacggtcagacgcatcaccggtgcacaaacgctcggccacaccgttggtacgcatagcgcgccatttgtagtgatcgcccttcaaccagatgtcatacaggtttttaaaacgatagtcttccgcaatctgctgcggcggcaaatggcaatggtaatcgaaaatcggctggtcttttgcgtagtcgtgatacagacggcgggcaaattcagtatctaacaggaaatcttcagtcataaacggagtcattttcgtcttcctctcaacgagtgagctagcttgcttatggtgcgatgctgacaaagttatcacaccaatttccagagtccgaagatattttcgtgagttagatcaataaacgtagttaaaaaaattactctcaaagtggtaaatctcgctgcaggccgcgccagtactggcctcgccgtcgtcaggtaatgtccctacaaatattcgcacatttgtgatggctctcaccttttaaagttgtatgacaagttatctttctgccgtcgcaaatcataagtcgacggaatgcaaattgccgattcattcatttgttagatgaatcgggttaaccggtacggaagccgaattagcacgaaactttcatggcaacgttcggggcgtgccggttttttttcggttacccggtcgtaactaacatcttcagcctctggcgggatgatggccgcgcttcctgcggatataacaaaacgatgaggttttacatgcgtaaaattaaagggttacgttggtatatgatcgcactggtgacgctcggcaccgtgcttggttacctgacgcgtaacactgtggcggcagctgcgccaactctgatggaagagttaaacatctccacccaacagtattcctatatcatcgcagcgtattctgctgcttatacggtcatgcaaccggtagcgggttatgtactggatgtgctgggtacgaaaatcggttatgcaatgtttgctgtactgtgggccgtgttctgtggtgcaactgcgctggcaggtagttggggtggcctggcggttgctcgtggtgcggtcggtgccgcggaagccgcgatgattccggcgggtctgaaagccagctccgaatggttcccggcgaaagagcgttccatcgcggtaggttactttaacgtaggttcttcgattggtgcgatgattgcgccgccgctggtggtatgggcaatcgtgatgcacagctggcagatggcatttatcatctccggtgcgttgagctttatctgggcgatggcatggctgattttctataaacatccgcgcgaccagaaacatctgaccgatgaagaacgcgactacattattaatggtcaggaagcccagcaccaggttgacacagtgaagaaaatgtccgttggtcagatcctgcgtaaccgtcagttctggggtatcgcgctgccgcgattcctggcagaaccggcatggggtacttttaacgcgtggatcccgctgttcatgtttaaagtttacggctttaacctgaaagagatcgcgatgtttgcctggatgccgatgctgtttgctgacctcggttgtatcctcggtggttacctgccaccactgttccagcgttggtttggtgtgaacctgatcgtttcccgtaagatggtcgtaacgctgggtgctgtgctgatgattggcccgggtatgatcggtctgttcaccaacccgtatgtcgcgattatgctgctgtgtatcggtggttttgctcaccaggcactgtctggcgcactgattacgctctcttctgacgtgttcggtcgtaacgaagtggcgacggcgaacggtttaaccgggatgtccgcatggctggcaagtacgctgtttgcactggtagtcggtgcactggctgacaccatcggcttcagcccgctgttcgcagttctggcagtgttcgacctgttaggtgcgctggttatctggaccgtgttgcagaacaaaccggcgattgaggtggcgcaggaatcacataacgatcccgcaccgcaacattaaggcttcgtgtaagttttagtttcccttcaaagccgccttctcaggcggctttttcatcactgcgagtagagctaaactcgcaaaagtggtataacaaatatagtctgccgtatcatgcctggagcgcatatggaaatcactgaaccacgccgtttgtatcaacaacttgccgctgacctgaaagagcgcatcgaacagggcgtctatctggtgggtgataaactgcctgccgaacgctttattgccgatgaaaaaaacgtcagccgcaccgtggttcgtgaagccatcatcatgctggaagttgaaggctatgtcgaagtgcgtaaaggttcaggtattcatgtggtttccaaccagccgcgccatcagcaggcggctgacaataatatggaattcgccaattacggtccgtttgagttgctccaggctcgccagctcatcgaaagtaatattgccgagttcgcggcaactcaggtcacaaaacaggacatcatgaaattgatggccattcaggagcaggcacgcggtgaacaatgcttccgtgattccgagtgggatttgcagttccatattcaggtagccctggcgacgcagaactccgccctggcggctatcgttgaaaaaatgtggacccagcgtagtcataacccgtactggaaaaaactgcacgaacacattgatgcccgtaccgtcgataactggtgtgatgaccacgatcaaatcctcaaggcgctgattcgcaaagatcctcatgctgctaagctggcaatgtggcagcacctggaaaacaccaagatcatgttatttaacgaaaccagcgacgatttcgagttcaatgccgaccgctatctgttcgccgaaaacccggtggtgcatctcgatacagccaccagcggcagtaaatgaaattcctgtccgacaggcgctacagtgcgcctgtttgtctcgtcggtaagcgaaaagtataaagtgtcagcctgtgtaaatcctctcgcctccctcccctgcattcagcaaaatcagactccacggacatgtaattttgataacgaacaacgttgacctttgttacaattagattcaatttgaatttatgcttttgaatgctttcttatctcacgatttaacagggaatagttcaggctgtgttgatgtatcaaacccgcagaacataccaagacagcaataacattgcggtagtgcatcatttaaaaccagcgtggcgttaaccgattcaccaggaataatgaatggaacttttgacccaattgctgcaagccctgtgggcgcaggattttgaaaccctggccaatccgtcgatgattggcatgttgtattttgtcttgtttgtcattttgttccttgaaaacggcttgcttccggcggcctttttaccgggcgacagtttactggtactggtcggcgtattgattgcgaaaggcgcgatgggctatccgcaaacgattctgctgctgaccgttgccgccagcctcggttgctgggtcagctatattcaggggcgatggctgggcaatacccgcaccgtacaaaactggctatctcatttacccgcgcattatcatcaacgcgcacaccatctttttcataaacacggtttatcggcgctgttaattggtcgctttattgcgtttgtcagaacactgctgccgacgattgccgggttatcagggctgaataacgcgcgctttcagttcttcaactggatgagtggtctgctgtgggtgttgatcctgacaactctgggttacatgctcggcaaaacgccggtatttttaaagtacgaggaccagctgatgtcatgcctgatgctgctcccggtggtgctgctggtgtttggcctggcaggttctctggtcgtgttatggaaaaagaaatatggaaatcgggggtaagggatgcaaatacctcgcatgtcacttcgccagctagcctggtccggcgctgttttacttctggtcagcacactattgctggcctggtccgcggttcgccagcaagagtctacgctggcgattcgtgccgttcatcaagggacaacgatgccagacggtttttcaatctggcatcaccttgacgctcacggcattcctttcaaaagtatcacccccaaaaacgacactctgttaattacctttgactccagcgaccagagcgccgccgcaaaagcggtcctcgacagaacattgccccatggctacatcattgcgcagcaggacaataacagtcaggctatgcagtggctgacccggttgcgggataactctcatcgcttcggataacttcctgttatccgaaacagatcactcactttggtgatttcaccgtaactgtctatgattaatgaggcggtggttaacacgaccgcttcgttgtctggacaatcgttcctttgtaataggtccgaatcacaatggaaggttcaagaatgaaataccgcatcgctttagctgtttctctctttgctcttagtgccggtagttatgccactaccctgtgtcaggaaaaggagcaaaatatccttaaggagatcagctatgccgaaaaacaccaaaaccagaatcgtattgacggtctgaataaagccctgagtgaagtccgggccaactgttcagatagccaactgcgtgccgatcatcagaagaaaatcgcaaagcagaaagatgaggtggcggaacgccagcaagatttagccgaggcgaagcaaaaaggcgatgcagataagattgccaaacgcgaacggaaactggcagaagcgcaggaagagctgaaaaagctgaaagcgcgcgactactaactcacaatagtcactacttactcacctggagaaaactatgtcgaaagaacacactacggaacatctgcgtgctgagttgaaatccctttccgatacgctggaagaggtgcttagctcatctggcgagaagtcaaaagaagagttgagtaagattcgtagcaaagcggagcaggcactgaaacagagccgttatcgcctgggtgaaaccggtgatgccattgccaaacaaacccgtgtcgcggcggcgcgtgccgatgagtatgtgcgtgaaaatccgtggacgggcgtgggcattggcgcagcaatcggtgtagtgctcggcgttctgctgtcgcgtcgttaattatggcggacactcatcacgcgcaagggcccggtaaaagcgttctgggcatcgggcagcgaattgtttccatcatggttgaaatggtggagacacgtctgcggctggcggtggtggagctggaagaggaaaaagcgaatctctttcaacttttactgatgctgggcctgacgatgcttttcgctgcatttggtcttatgagcctgatggtgctaattatctgggcggttgatccgcaacatcgcctgaatgcgatgattgccaccaccgtggtgttgctgctactggcactgattggcggcatctggacgttacgtaaatcgcgtaagtctacgttgctgcgccacacgcgccatgagctggcaaacgatcggcagctgctcgaggaggagtcccgtgagcagtaaagtcgaacgtgaacgacgtaaggcgcaactgcttagccagatccagcaacaacggctggatctttccgccagtcgtcgtgaatggctggaggcaacaggcgcttacgatcgtcgctggaatatgctgttgagtctgcgctcctgggcgctggttggcagtagcgtgatggctatctggacgattcgccatcctaatatgctggtccgctgggccagacgcggttttggtgtatggagcgcctggcgtctggtgaaaacaaccctcaagcaacaacagcttcgcggttaacttcctctctggccggagaaattccggccttatccctcaaattttttgaaaatatttgacagttttccttgctaacaatcacgcttcgtcacgtttatgattctctccatcgacagcaacgacgctaatagcgcgcccttgcacaaaaaaacaatcagcagcctgagcggcgcagtggagagtatgatgaaaaaattagaagatgttggtgtactggtagcgcgtattttaatgccgattctgtttattacggcaggctggggaaaaattactggctacgcgggtacccaacaatatatggaagcaatgggcgtccccggctttatgctgccgctggtgattctgcttgagtttggtggtggtctggcaatcctgttcggtttcctgacacgtaccacagccctgtttactactggctttacgctgctgacggcatttttatttcacagcaactttgcagaaggcatgaactcgctgatgtttatgaaaaacctgactatttctggcggattcctgctgctggcaattaccggtccaggcgcattcagcatcgaccgcctgctgaataaaaagtggtaagcacgcgctatacttaacgataaaaaacgagggggaagctcctcgtttttgctattggaggatagaaaaatgggtcaactgattgacggcgtctggcatgacacctggtacgataccaaatccaccggcggtaaatttcaacgttcagcttccgcatttcgtaactggctcactgccgatggcgcgccaggccccactggcaaaggcggttttgccgcagagaaagatcgttatcatctctatgtttcactcgcctgcccgtgggcacaccgcacgctgatcatgcgtaagctcaaaggactggaaccgtttatttccgtttccgtagtgaacccgctgatgctggaaaacggctggacctttgatgacagttttccgggagcaaccggcgacacactctatcaacatgaatttctgtatcagctttatctccacgccgatccacactacagctggacagagttactgttcccgtgctgtgggacaaaaaaaaccacaccatcgtcagcaacgaatcagcagaaatcatacgcatgttcaataccgcgtttgatgcgctgggtgcgaaagctggagattactacccaccagccctgcaactgaaaattgacgaacttaacggctggatttacgacaccgttaacaatggcgtgtataaagccggttttgccaccagccagcaagcctacgacgaggcggtggcgaaagtgtttaaatcgctggcgcgactggaacagattttaggtcagcaccgttacctgaccggcaaccagctaaccgaagccgatattcgcctgtggaccacgctggtgcgttttgatccagtgtatgtgacccacttcaagtgtgataagcaccgcatcagcgattacctgaatctgtatggcttcctgcgcgatatctaccagatgccgggaattgccgaaacagtcaatttcgatcacatccgtaatcattacttccgcagccataagaccatcaaccctacgggaattatttcaattggtccgtggcaggatctcgatgaaccgcatggacgagatgttcgcttcggttaaaaaaaggcaccttacgaggtgcctctgataattagctaagtacgtgttgttcatgtcggatgcggcgtaaacgccttatcaaacctacaaaacatttatattcaatatgttgcaatgaccgcgcaggccagataagcgtagcgcatctggcaattttgcgcttgcccttatccttcacagcgccttattaattcatcgcgataatatttactgccatttcattcacgtctattcttaatttgctgctttaaaaacaagtgattgagcaaaattgaggcaaaaatggactggtatctgaaagtactaaaaaattatgtcggtttccggggtcgtgcgcggcgcaaagagtactggatgtttattctggtcaacatcatctttacgttcgtgctggggctactggataaaatgttaggctggcaacgtgccggtggcgaaggcatcctgacgacaatctacggtattctggtgtttttaccatggtgggcagttcagttccgccgcctgcacgacaccgaccgctcggcgtggtgggcactgctattcttaatcccgttcatcggctggcttattatcatcgtctttaactgccaggcgggtacgccaggcgaaaaccgctttggaccagatccgaaactggaacaagactaataattaagcaccttgtaaaaggtgcttaatcgattattttccgctaaaaagtttgggaatttcccgcagacaccaggatttcgcctcccccatactgtcacgacgccaggccataataatatcgatctcgctggtcgattccgggctgacgacacgcaaccgcccttccgcaatatctttttcgaccatcggatacggcatcgtcgccacgccaagccccgccagtaatgcctgacgtttatcttcaatcgtgctcaccgttaagcgcggctgtttgtccagcaactgtacggtcaacaccgggcgctcacgagcggtatccgccaccgcaattccacgatatttcacgcgcgtcacttcagataacggttccggctcctgatgaatcgggtgatccggcgcggcaacatagacgttcattaaggtatagagtttgcgcgagttgatctccgacgaggaacgaaaatgcatatccggcgcgataacgatatccgcccgcccctgctccagccgttcccacgcccccgccagcacttcggtgatgattgccagttgggtattggcttttgccgccagtttgtcgattaacgggaaaaaggcaggtgtcggtaccagcgcctcggtcacaatggtgagatgcgtttcccaaccgcgcgcgagggcttccgcatcggtagtcagtttatctgcggcttccagcaaaacgcgccctcgttccagcaacatcctcccgacattggtgaatttggtgcgatggcccgagcggtcaaacagcaccacatccagctcttcttccagtttttgcatggtgtagctaagtgcggaaggcacgcgtcccagctcatccgccgccgccgcaaaactgccccggcgatcgatcgcatccataacccgtagtgcttccagcgttaatgccctttctttggccatttcgttctcattcaggaaatttgaacataccgggcagaatatctggctaacaatgtagcgtccagccccttaccataaaaggaagtaaagagaggtcaagaattatgattactacccgaactgccaggcagtgtggacaagcagactacggatggttgcaggcccggtatactttttcctttggacactacttcgacccgaaattgttaggctatgcctccctgcgcgtgcttaaccaggaagtgctggccccaggtgccgcctttcagccgcgaacctatcccaaagtcgatattttaaatgtgattctggatggagaagctgagtatcgcgacagcgaaggcaatcatgttcaggccagcactggtgaggtgttgctgctctctacccagccgggtgtcagctatagcgaacacaatctcagcaaagacaaaccgttaacgcgaatgcaactttggctggatgcctgcccgcagcgagagaatccgctgattcaaaagctggcgcttaatatgagcaagcagcaattaatcgcctcgccagaaggtgggatgggaagcctgctattgcgccagcaagtgtggctgcaccatatcgtgctcgacaaaggcgaaagtgcgaatttccagttgcatgggccacgcgcgtatttgcaatcgattcacgggaaatttcatgcgcttacgcatcatgaagagaaagcggcgctaacctgcggtgatggggcgtttattcgtgacgaggctaacattacgctggttgccgattccccactgcgcgctttgctgatagatttgcctgtctagttgtttttacagggagatgatgatgagtaaaaaatcggccaaaaagcgccagccagtgaagcccgtggtggcgaaagaacctgctcgtaccgccaaaaattttggctatgaagagatgttgagcgagctggaagccatcgtcgcggatgctgaaacgcgtttagccgaagatgaagctaccgcgtaaagacaagttgccggatgcggcgtaaacgccttatccggcctacaaaacccaacaacatcaacaaattgtgcaattcgtaggccagataagacgcgccagcatcgcatccggcacaatacccaaaaccgggcgtttatctggccttgctcgccataatctcgataatctgccgatccgtttgctgcatcgaatggcttgctaacgcacacaggttggcaatcgactgctcaacatcatgcgccacaatcccttcattaccggttacggcggtatcatccagcgccattaacaccgctttccacgcagccgaagcactggtcgaaaccttcatcgcgcagctgttcgacgcaccatcgcaaatcatgccgctgacatcgccgatcatactgctgatcgccatcgaaatggtttcataacgcccatccaccagccatgccatcccggcggcggcccccattgctgcggtcgttgcggcacaaagcgcagacaaacgcggtaactggttatggatgtaaatcgcgctcaaatgcgaaagcatcagcgcacgcgccagccgttcatcatccgctccgaagtgttctgctaccaccaccacaggcattgttgcggtgatcccttggttacccgagccggagttactcattgccggaagcgtagcgccgcccatacgcgcatcggatgccgcgctggtacgaatcacaatggatgaagagagatctttcgccagcaaaccgcgcgcgcactgtttttccagcgtcgcaccaatatgcagcccccagttaccgctcaaaccttcctgcgataacgcacaatttaacttcgcagaatcgagaataaagcggatcgccgcaaacgggacttcattgacgaacttcaggatctcagccagcgtcgtcctggaaagcaccgtcagcggcgactcttgctcgccctctgtcacacacgcctgctgggtaaacaccacaccattgtgcgtctcaatatgcacaatgttggtatgcccgccgacaatggtgacacacgcccacttctcaccgttccagactttggcgcgtgagaagaggatttcatcgcaaggttcctggatcttaactgagactttccccgccgccagcagtgctttggcatcggcaattgcctgcgcagttgcatctttcagcacttccagcccggcgttagcatttccacctaacgctcccagcgccgccgcaatcggcagccccaccattcccgtgccgggaacggtgacgcccagaccgttcttcatcagatttggcgaaacccaggcttctacacgttcaaccggaccttccagttcagccgcagcaaccgccgccgccagcgccagtgaaatcggttcagtacaccccagcgccggttttacctcctcctgaacggcgaggatgtaacgctgccataacggatttaaagtcgaatcaaacatattaaaaaccttaaaatttcaggtaaatcaagaaaatgccaggaacggagaaacacaaagcaacaaaccagtgacgataatcaggtacagagacatccctttgtatttgtgcaatgccggtactttgtaaaccagccacgccgggatcaggcaccctaccatgccgaaaatcgggctacagatagaggtgaagctcaacaccggggcgttcagtacgatggcgctccaggccagcaaaatggcgaaaatcatgatgccgcgctgaacgagattttcgttaatcttctcggcaggtatcttgcgacgcaggatagttcaattacgatcccttgcgttgcttcgcgaaagcctaaatagacgccaaagaatgcagtcattacagcaaagatattgagaatgacgctgaccactttcacccacgctgcgccgtcaccgctaataaactgtgcggcaatcgccaacgcggaaatattctgctcgtaggcttttaccgcttcgtcatgtcccatcgccagcgtgaacgacacggcgtagaaaaagacggtgacaaacaaaatgccaaacgcgatattcattgcccgcaatgctttatgccgcgccacttcaattgatttttcccgcgagcgataagagatcaccatcgggcttaacgtctggataaacagaatcgacgtcagggtaaacggcagcgtaataatggcgtttttcaccagcagccccagcggcggtagcgaaccgacgttatacagatgccacattcccaccatcgacacgcccagcgccgcgaccaccagcagcttggtcagcaccatgccggtcgaaattttgaataacaatttctcgccgcgtgaagagatcgccaccagaatgcaaatcagtaccagaccataaaagggactgtctgacagcaacccttccgtcacgccgaaggtatgcagataggaagcactatcgttggtgatggcggtggaatagacgaacatccaaatcaccagcattacgaaatagagcgcacctaacaggatgccccagtttttacctaaataaccgctaatgacgctcgggtaatctttacattctggtgattctgccagcgtattaataaacaatcgctgaaacagatacattgccgggtaaccaatcaccgatgagagcaaaaatacccacaatcccatcaaaccgacctgcaccgggagaaaaacaatccccgcgccaatcgccatcccgatactcataatcacccagccggtgtcagtactgtcgaatttgatcgcttctcgccactcgctctcactcattccagcacgacccgccggggtcgaagcgtctgcaatgacgcctttattcgatgcaatttccataatttctcgctcaatattttgtagggcttattatttttttccgagccgcatcaaggcgatatgcggtctacgtttttgcaggcgagttattagaataaagaaatgatacgcgcgaggtcagagaaaatcttcacaatcaagactttgaaatagcaattgtgggtaataattttctattaaattgagttaatggaaataattattctctatttgcggcagatcacaataaaaaagggtgcacattttgtgcacccaaggatgaaagctgacagcaatgtcagccgcagaccactttaatagccagtcctccgcgtgatgtttcgcggtatttatcgttcatatctttgccggtttcatacatcgtctcgatcactttatcgagtgaaacacgcggtgccgaggtgcggcgcatcgccatccgcgcggcgtttactgctttcacggcattaatggcattacgttcaatgcacgggatttgtacctgtccggcaaccggatcgcaggtcagcccaaggttatgctccatcgcgatttccgccgcattgcatacctgcgccggactgccgcccagtagttcagttaaccctgccgccgccattgaacaggccacgccaatctccccctgacagccgacttccgcgccagagatggaggcgttcattttatacagcgcgccaatagcccccgctgccagaaaatagcgggcaattgaccgctcgtttaccggacgacggaacttatcgtaataagccagcactgccggaataatgccgcacgcaccgttagtcggtgccgttaccacgcgcccgccagctgcgttttcttcactaaccgctagcgcgtacatgttgatccagtcgatgacattcatcggatcgttagagatgttatcgctggaaaccagttgacgacgcagcgctacggcacggcgcggcacattgagcggaccaggcagcacgccttcagtattcattccacgttcaataccgtcatgcatcacttgccagatacgggcaaaccctgcgtcaatttccgctttactgcgcagcgccagctcgttgtgcatcatcaggccagatatagacaggccgttgtaatcacacattttcagcagttcacctgctgagtggaaatcgtaaggtacgggtgtttcgacatcgtacgacaggccgaagtgttcttcttcgacaataaacccgccgccgacagagtaataggttttgcttaatagctcttcctgtcccttccaggcagtgatccgcattccgttctcatggcgaggcaacatttcgggatggaagataatgttctttgctacaggaaaatcaacaatatgcgcgccagaagtcaccggcaaccgcccgctgcgcgtcactaactctataaatgcagggatctcatcaatgacaacatcctgcggactgtttcctgccagtcccatgatgatggcgacatccgtggcatggcctttgcccgtcagtgacaacgacccgtacagatcgaccacaatatggctcgtcgcggttaataagccgctactttccagccgatcaataaaactttttccggcattcattggccccacagtatgcgaactggagggaccaatcccaattttgaaaatatcgaatgcactaatcatatccacaccctcggattgccgttcagtaaagtggagcggaacgaccttgcgaccgtcccgctcacgaggccttacgcactacgtactgcgatggcttcaatttccaacttcacatctttcggcaaacgcgcgacctgcacacagctccgggtcgggtaggtcgcctgatgttcatcgaagaactgcttatagacttcattgatggtggcaaaatcattcagatcggtgatgaacacggtcatcttgatgatatcgcccacactcagtccggcagcaaccacgatcgctttgacgttttcgaggcttaaacgcgcctgatcttgcacatcagccgggatctcaccggtctgtgggcaaaccggaatttgcccggaggtgaagaccatgctgcctaaatcaacgccctgaacataagggccgattgcgcctggggcacgttgcgtttcgataatctttttcatacatcctccggcgtcagagcgcctgggtaaaggtacgtgaaataacatcctgttgctgttcacgggtcagtgcgttgaagcgcacggcgtagccagagacacggattgtcaggttaggatatttttccgggtgctcgatggcatccagcagcatttcccgattcattacgttgacgttgaggtgttgaccgccttcgacatccgcttcgtggtggaaatacccatccagcaggccgacaaggttcgttttacgtatcggatcttctttgcccagcgccgcagggacgatggagaaggtgtacgagatcccatctttggcgtaggtgaatggcagtttcgccaccgacgtcaatgaggctacggcgcctttgcgatcacgaccgtgcatcgggttagcgcccggcgcgaacggtgttccggcgcggcgaccgtccggcgtgttcccggttttctgaccgtacaccacgttagaggtgatagtcagaatcgattgggtcggcacagcattgcgataggttggcaaagctttaattttcttcataaagcgttcaaccagatcgcaggcaatgctgtctacgcgctcgtcgttgttgccatactgcggatattcgccgtcaatctcgaaatccaccgccaggccgttttcatcacggattggtttcacacgagcatatttgatggcagacagggagtccgttgccaccgacaggcccgcgatgccgcacgccatggtgcgatagacatcacgatcatgtagcgccatcagcgaagcttcgtagctgtacttgtcgtgcatgtagtgaatgatattcagcgcgctgatgtactgtaccgccagccagtccatgaagtggtcgaggctatccatcactttgtcgtagtccagcacgtcatccatcaacggagccgttttcgggccaacctgaatcttcagcttctcgtccattccgccgttgattgcgtacagtagcgttttcgccaggttagcgcgtgctccaaagaactgcatttgcttaccaatcaccattgggctgacgcaacaggcaatcgcgtaatcgtcgctattgaagtcagtacgcatcagatcgtcgttttcatactgcaaagaggatgtgacgatagacacctgcgcggcatattttttgaaggcaatcggcaaggcttccgaccacagaatagtcaggttaggttccggtgcaggccccatagtgtgcagggtgtgcaaatagcggaaggagtttttggtcaccagggttcgaccgtccagccccatcccgccgatcacttccgtcgcccagatcgggtcgccggagaacagcgaatcaaattccggcgtacgcaagaagcgcaccatacggatcttcatgatgaagtggtcgatcagttcctgtgcctgctgctcattgagtacgcctgctttaaagtcgcgctcaatgtagatatcgaggaacgatgccgtgcgccccagcgacatcgcgccgccattttgcgatttcactgccgccaggtaagcgaagtagagccactgcaccgcttcctgtgcattctgcgccggacgggagatgtcaaaaccgtatttcgccgccatttcttgaatctgcaacagcgcacgacgatgttccgccagctcctcacgcagacggagcgtagcttcgagatcttcgcctttttccagacgggactggagatcggcaaactgcagttcgcgttcacgtaccagataactgatgccgtaaagcgccacgcggcggtagtcaccgatgatacgcccacgaccataaccatctggtaaaccggtcagtacaccagatttacggcagcgcagcatatccggtgagtaaacatcaaatacgccctggttatgggttttacgcagatcggtaaagatgtattcaaattcgctatccatttcacgaccatacgcgtggaatgaacttctaatcatattaatgccgccgaacggatgcagtgcacgctttaatggcgcatccgtttgcagacccactattttttccagcggctggtcaatatatcctgcatcatgagcggtaattgtggtggcaatattggtatcgaaatccaatggcgcgtgagtcgcattttcgatacggatgccttccatgactttttcccacaattccgtggtggcaggcgtcgcttcggcgagaaaagattcatcgccttcataaggtgtatagttatgttgaataaaatcgcggacattaatttcgtttttccagtccgtacctttaaagccaagccatgcgtcggcgtacagcttatcgctggtatcaatatctaccttcatgaaaaataatctctctacaatacttcaactaaattatgcaaattctgcgggcgcgttcactttgcctaaatgaatggcatccaaagcaatcattttttcttcgttagtcggaattacggcgcaaatgacacgcgcattttcactggaaacaattcgctctccaaaagagttagagcgattattcatttctgtatcaatctctacgcctaatacagctaaatgttccatgaccagacgacgaattaaacttgaattctctcctattccgccggtgaatataattccatccaggcgatgtaatgaagcagcgtgtccggcaatatgacgggcaattcggtgaacaaaggttttaattgccagttgcgcgcgttcgtgaccttcatgccaggctttttccagaacacgtaaatccgaagaaaggccggaaatacctaataatcccgactctttattcactacgcgttccaggtcccccaggctctggttggtttggctggcgacccaggacatcgccccgaagtcgacatcaccactgcgggtacccatcatcaagccttccagcggcgtcattcccatggaagtgtcaacactctgaccgttgcgaaccgcgcagattgacgcgccattgccaagatgcgccacaaccaggccggagtcatcttccgccagattcagcagagaatgcgcgcgctgggaaacatagcggtgcgacgtgccgtggaaaccataacggcgtacacctaactcttcataatatttccacggcaggccgtataaataagcttccggagccatcgtctggtggaaactggtatcaaataccgccacctgagttacgcccgggaataattgctgcgccgattcaataccacttaaattggcgtaattatgcaggggtgccagtggagaaacgcgacggatattatcaatgacttcatcggtaataatggcggactcggtaaaaatactgccgccgtgagcgatgcggtggccaattaaggccacattgtcatttaaattccgtttttccagttcaaatgcaattgccttcaatgcaccttcgtagctgtggtgagccagcggtgctggctctcccccatttacggataagaatgcattttccgagttaataccgtcggcaatacctgacattaatacttcacagtcgctggcattgagtacggaaaacttaatcgaagacgaaccacagttaataaccaaaacaaccggaaattcattcatctcttttctcatcctgagttacggattaaaacagtttgtatacgatgttcaggatggtcagcagaccaatcacggtaacaaacacgttatccagacgaccacggtatttcgccagagacggcgctttacggatggcatacatcggcaacaggcacagcagtgatgcgataatcggtgcgcccatggcttcaatcaggtcgaggatgttcgggttggcgtaggcaacaacccaggtggagcccataatgaaaatcatgctgatagtattcagtttacccagcgacactttggttttgtcacctttataaccgaacttcagaatcaaaccattcagcccttccagcgtccccagatagtgaccgaagaaagatttgaaaatagccacgagtgcgatgatggaagcggcatattccagtgtaatcgcaaacgttgttttggtaccggtcatggacgcaaagtggttagccagataagaaagcactggaatattctgcgctttcgcttcagccatattcgccggagacagcgtaaacaggcagctaaaggcaaagaacatcaccactgcaaccatcagcatactggcgcgagagatgatttgtgaacatttacgctcggtgaagtcgcgaccaaaatctttctcgtactcttcacgtttagaaaccacgaaggaagagacgattggcgagaagttaaaggagaaaaccatgatggaaatccccagccagacggtgatcaggataccgtcatgaccagttaacgacagcgaaccgaggtcaacctggtcgataactgcagagttccagtaagggatcagcgaaagagaaatcagcaccaggctggcgataaacggccataccagatagctcatcactttaaccatcagatccttaccaaaccagatgacgaaagccatcagcagcaacaggaacagcgccacaaagccgcgattcagcggtgcaaagccgagctggttttcccagaacgtcataaaggtattggtaatagtaacgccataaatccacaacagtgggcaaatcgcgaagaagtacaggaacgtgataaccacgccgccagttttaccaaaatgctcttccaccgtttccgtaatgttgccggaagggttagagccagaaagacacagacgcgccagtgcccggtggcaataaaacgcgatggggtatgctaataccaacatcagaagaatcgggatcagtccgccaaaacctgcgcggatagggaagaacagcaccccggcgccgattgccgtaccaaacaagcctaacgtccatgtggtatctgatttacgccaggacgattgttttgtctggctggatacaatgctatctgaagtactcatatcctatcctcaacgaattaattaagcgtcaacgaaaccggtgatttgagagacgcgagaaagatcgatattgccgccggaaataatactgacggtttttctgttttgaatatattggtctaatttaccgcttaataatgcagcacatgccagagcgcctgcgccttcggtgacgactttattgcgctgaattaaggcaatcatactgtttctgatttcgtcttcgctgaccagcacgatgtcatcgactaattcacgaacgatttcgtaagttaaattacccgggcgggagacatcacaaccatccgccagggtgccggtagttcggtgcgtagttatttctccggagtggaaagaagccgccatgccgtgaacgttttcagactgtacgccaataacacggatggtcgggttgatagatttaattgccaccgcaatacctgcaattaaaccgccgccgccaattggcacaatcacgttatcgacatcatagagatcttccataatttccagaccaatcgttccctggccagcaatcactttcggatcatcgtaaggtgggataaaaatacggccttccatttcgacaatttcgctcactttagcaatagtgtcgttgaagttatcaccatgcaaaacgacttctgcggagtagtcgcacgttgccgcgactttggatttcggcgcaccttttggcatcaccactttaccgtcaatacccagcatcgcgcaggagagcgaaaccccttgcgcatggttgcccgcagagcaggccactacacctttacgtttttccgcatcagtcagtgaacttaatttattaaatgcgccacgaattttaaatgaaccggtacgctgcatgttttcgaatttgaggaatatttcacctttgcaacgttcactaaaatagttggagcgaggcatacctgttttataaattcgcccagccagtcgttgttttgcttcaatgatgtcatcaatagcaaccgggagatcgtatgtaatatgcattataaaacctcttagcctgaattaaatatgtaggtaaccgtaaccgacacctgcaaaacagacaggtggattatttatgtttaaattaaaacaaataactaatcaacttcaattaattgccttcgtctacacccattataagatgaatactctttggctaattccaccaaaaccgatgctgcttttttaatacgataatttttcgaccataccgcggcatattgtgccacaggtaatgtttcttcaaccggaatagtaataaattgattagaaccaaaaggtgatgtcatatcacaaggaattacagttaagaaatcagcattgagaacaagattataaattgtcacgactgagtcggttttaacgatgttttcaatactgatgccatttctttgtaacgtagtaagtagttcgctgtagtaccccatattggtttgtggcaacacccactgttcgttcttcaacgactccagcgtggtggtgccggtgcatgttcgggacttactggctaccagcacaaactcggactcgaacagcggctcaacatgtaaatcctgaagcttcatttctgcgcttaacgtaccaatcgcaaaatccagtcgaccgtcgcggattgccggtaagaacgaagacagttgcgcttcatacatagaaacctgcgctttcgggaacacctctttgaacttgttgatcatccctgacataaaagtaaaaccaatcaatgaaggaaaaccaaatgagacttccaccaccgcctcagaagacataccgcttatctcattaaccatatttttcatttcacgggtaatggattcggaacgggagagtaacaattgaccggcaggtgttaatgttacaccggtatttttccgcaccactaactccaccccaaaataatcttcaatatcgttaatgattttactgacggccggttgagttaaccctaactcttttgcagccgagccgatagaaccacttctaataacttcctgaaagactaccaggtgctgcgttttcggaagaagaatagtgctcataacgacctacgttaattacctcattgacggtatgaagtgtatcaaaatgaaatgaacaggatatgtgcgaccactcacaaattaactttcaatactttccatggcatcgtcaccaaaattaaatacccttaagtatcaacaagttaaagtatgaaaatcagcataaaccctgacttttgtcaaaaaaaatgacggggataaccatattttatggcgataacatcattctttatgtggttaatacaaaaaaggggctgagactatatttcaagcaattaccggataattaccaggcaaaatttgagttaaatttaatgagtaagttctcaaattttattataaacaaaccattttcagcgataaataatgcggcacgtcacattttttcacgctatttgttggagaacaaacatttattttatcaatattttaaaatttcgaatacaggtattgatcatctcgaacaattgattaacgtcaactttttctcttctggcaggacgtcattttgtgaatgcaatcgttttccataaattcttctcccctcataggcaacgaatagcattttgtgttgaggatcacaaaacgaataattgctggtcgccgcgataaggtcagacgaagtcaacaaggaggattttcgctgtgctttacatcagcgtaggccatagaatgttgcttcgttgactgtaatgccgggtaaatgagcattttttgatagtgcgaaagaaccctgcgaggaaaataagcatctattattgtttgtcatgatgacaaggctggcatcaatgaaaggcttctcaattgcacatatttttcacccttcaatgcacgcagtggttaacaatcacaatagaaatattgattattggacggtaaaaatttaggttataacgcccaaatgattcaacgatcggacaatacctgcgaacttacaattaatgagagaaatatatgtataattacgaccttttaaatgcaatatagacttaataacttcttacaaagtctgttattaataccgtagatattcatcttaccctgggcaccaaaagcaaaaacccgccgaagcgggtttttacgtaaatcaggtgaaactgaccgataagccgggttctgtcgtggacagtcattcatctaggccagcaatcgctcactggctcaagcagcctacccgggttcagtacgggccgtaccttatgaacccctatttggccttgctccgggtggagtttaccgtgccacggactgttaccagccgcgcggtgcgctcttaccgcaccctttcacccttacctgatcccgcttacgcgggccatcggcggtttgctctctgttgcactggtcgtgggtttcccccccaggcgttacctggcaccctgccctatggagcccggactttcctcccctccgcccgtctcccccgaagaggacgacgacgaagcggcgactgtctggtcagcttcggcgcgcagtatagagggtttgcgcgcccttgtcaccccgcgttgcgcattccaatcgccagtgtcgcggcgatattacgtgaagcacggcagatattgtcataagctccgcggagtgcttcgtctaacgtaccaatgctggtcagtacgctgaagaccgcatcaatgccatgctgatgtacaacgccaacatcattggtcaggctacccgcaatgccaatcaccggtttatggtacttcttcgccacgtttgcgacaccaatcggtaccttgccgtgaatactctggctatcaatacgcccttcaccagtgatcaccagcgtacaatcgtgaatatgttcctccagattcagcgccgtagtgacgatttcaataccacttttcagttctgcaccaagaaacgccatcagcgccgcgcccataccgcccgcagctcctgcgccggggacatctttcacatcaacatgcagcgcttttttaataacatcggcatagtgagagaggttattgtccagctcgacaatcatcgcctcactggctcccttttgtgggccaaagatgcgcgaagcaccactgtcgccgactaacgggttggtgacatcacaagcgacgcggatgacacaatcttttaagcgcggatcgagaccggaaatatcaatatcattcagagtattaagactaccgccgccaaaaccaatttcattgccgttggcatcgcataatttcgcccccagcgcctgtaccatgcctgcgccgccgtcgttggtggcgctgccgccaatgccgataataatgtttgtcgcaccgctctccagcgcctgcaggattaactcgccagtaccgcgtgaagtggtcacgagtggatcgcgtttttccgcaggtaccagttccagcccactggccgccgccatttcgataaacgcggttttgccatcgccggagatcccccaactggcattcactttctcgcccagcggccctgtaacccaggcgtgacgttcagccccctgggtggctgcaatcatcgcttccaccgttccttcaccaccgtcggcaaccggaacagaaacatactgtgcatcaggaaaaatttcccgaaatcctttttctatcgcctgcgcaacctcgctggcagataaactttctttataagagtctggggcgattacgattttcatacctatgcctgttaccacatgacgccggagggcgtttctcttattcggcctggattccaggcccggattgcaatacgccatccgggcacgacgtcattagcgagtaacttcgactttcgccagtttttcgtagtagcacgccagggcgctatgatccgccgttcctaaaccatctgcacgcagtgcctgcatcatctccataaccgcagctgtgagcggcagttgcgcgccgacgccgtgagaagtatccagcgcattcgccagatccttaatatgcagatcaatacggaagcccggtttgaagttgcggtccatcaccatcggcgctttggcatccagcacggtactgcccgccagcccaccgcgaattgcctgatacaccagatccgggttaacgcccgctttggttgccagcgttaacgcttctgacatcgcagcaatattcagcgccacaatgacctgatttgccagtttggtgacgttacctgcaccgatttccccggtatgcaccacggaacccgccatcgctttcatcaaatcatagtatttgtcgaaaatagccttgtcgccgcccaccatcactgacagcgtaccgtcgatggctttcggttcaccgccgctcaccggggcgtccagcatatcaatgcctttcgctttcagcgcttcgctgatttcacggcttgccagcggtgcgatagaactcatatcgatcaataccgtacctggcttcgcgccttcaataatgccattctcacccagcgccacctctttcacatgaggggagtttggcagcatggttatgatgacgtcgcactgttcagcgatcgctttagccgtagaggctgtttctgcacctgcagcaatcacgtcagcaatagcttctgggttacggtcagcaaccaccagcgagtaacctgctttcagaaggtttttactcattggtttacccataatccccaggccaataaaaccaactttcatagtcatatcaatcatctctcttgttgcggtggtggttattttttaaaggtatcagccagtttctgagtggcagagcggaagatgccgagatcgctgccgacagccacaaacgtcgcaccccattccagataacgacgcgcatcagcctcgactggtgcgaggatgccgctgggtttgccgtgcgcgctggcacggttaaaaatgtgctgaattgctttttgtacatccgggtgcgaggcattgccgagatggcctaatgccgcagccagatcgctggggccgacgaagatgccgtctacaccttcggtagcggcaatagcatcgacgttatctacgccctgctgactttctatctggaccagaatagtgatgttcttgttcgactgagcgaaataatccgccacggtgccaaacatattggcgcggtgagaaacggagacgccgcgaatgccttccggtgggtaacgagttgatgccaccgcctgctctgcttcctcttttgtttctacaaaaggaatcaggaagttatagaaaccgatatccagaagacgcttaataattaccggctcgttggtcggcactcgcactactggcgcgctggcgctgcctttcagggccattaactgcggaataaacgtggagatatcgtttggcgcatgttcaccatccagcaccagccagtcaaacccagccaaaccaagaacttcagtgctaatcgggttagagagagctgaccagcaaccaatttgtacctgtttcgcagccagtgcggctttgaatttattcgggaaaacatcgttattcatcgcttatacctttgcttatttctgcaattccatacgtttaatgtcgccgactacgaagaggtagcagaccatcgccatcagcgctgaacatcccacaaaaaccagtgctgcattgaaggagtgcagttcacttaccaggtagccaatcaccagtggagtgacaatggaggcaacattgccaaagacgttaaagacgccgccgcagaggccaacaatctctttcggcgcggtgtcagaaatcactggccagcccagcgcaccaaatcctttgccaaagaaagccagcgccatcagcatgaccaccagcgtggtgttgttggtgtagttacataagatgatggtggaagccagcaacattcccagcacaattggtagcttacgtgccagggtcagggacaaaccgcgtttgatcagataatccgagaagacacctcccagcacgccgcccgcaaagccacacagtgccggaatcgaggcgaccagacccactttcagaatcgacatgcctttttcctgcaccagataaattgggaaccaggtgaggaagaaccaggtgatggtgttgataaaatattgtccgaaaaatacgcccagcatcatgcggttagagagcaattgcttgatgtaatgcagtttgggtccgcttgctgccgcactgcccggctttttgtggtccatatcgaccaccgcgccattttccgagataaacttcagctcttccgcagacatacgtgggtgatctgtcgggttatgaatcaacttgatccacagcgccgtcagcacaaaaccaatcacccccataacggtaaagacgtgctcccagccccaggcgaaagtcagccagccaagcagcggcgaaaagagcgccaacgagaaatattgcgccgagttaaagatggcggaggcagtaccacgttctttcgtcgggaaccaggcggcgacaatacgggcgttcgccgggaatgatggcgcttccgagaaccccagcataaagcgcataaagaacatggagatcccagcccaggccagcggaaacatatcgacaaagccttgcaggaaggtgaacagcgaccagaaaaagaggctgtaagtgtaaactttcttcgagccaaacttatcaagcagccagccgccgggaatttgcatcagcaagtaggcccagccaaaagcagagaagatgtaacccatcgaaaccgcacttaactgcaactcttttgccacttcggtaccagcaatagacagcgttgcacgatcggcgtagttaacggcggtaacaataaaaataatcagtaatattaaatagcgggtatgcacgcctttctttttttcgtcaacggtgtccagcatcattttatttacctcgggtacttatgctgatttttattattatggggaaggtgttatttatgagtttcatttatgccgttacgacaatgaactcgggaattagtataagcagcgcgagaataataatcattgtgcaaatgctaatttaattaatactatttaaatattattttgagcatatgcacataaggttgcgcgctaaagcacagatttgcgctttaccttgccgggaggtactgcaatccctgaaatgattgacattgatcacatttctgcatttaaactcctgacattcttatttcacccaatgaagttatttatttttaaatgagaccaggtcctcattttaatagtccctggctggagaatattgcacaatggccaacatcaaaatcagacaagaaacgccaactgcgttttatataaaagttcacgacacagataatgtggcaattattgttaatgataatggcctgaaagcaggaacgcgttttccggatgggctggaattaattgaacatattccccaggggcataaagtcgcattgctggacattccggctaatggtgaaattattcgttatggcgaggtgattggttacgccgtgcgcgcaatcccacgcggaagctggatcgacgaatcaatggttgtactaccggaagcgccgccgttacatacgctgccactggcaaccaaagtcccggaacccttaccgccgctggaaggatacacctttgagggctatcgcaatgccgatggcagcgtgggcaccaaaaacctgctcggcatcaccaccagcgtccactgtgtggcaggcgtggtggactacgtagtaaaaatcattgaacgcgatctgctaccgaaatacccgaacgtcgatggcgtggtggggctgaatcatttgtacggttgtggcgtggcgattaacgcacccgcggcagttgtacctattcgtaccattcacaatatttcgctgaaccctaactttggcggcgaagtaatggtgattggtctgggttgtgaaaagttgcagcctgaacgcctactgactggaacggatgatgtgcaagctattccagtagaaagcgccagcattgtcagtttgcaggatgaaaagcatgtcggttttcagtccatggtcgaggatattttgcaggtcgccgaacgccatctacaaaaactgaatcaacgtcagcgagaaacctgtccggcttcagaactggttgtcggcatgcagtgcggtggcagcgatgcgttttctggcgtaacggcaaacccggcggttgggtatgcgtctgatctattggtgcgctgcggcgcaacggtgatgttttcagaagtcacagaagtgcgtgacgcgatacatctgctgacaccacgcgctgtgaacgaagaggtcggcaaacggctgctggaggagatggagtggtacgataactatctcaatatgggaaaaaccgatcgcagcgccaaccc
